United States Patent Application Publication US 2026/0058010 A1 - sequence listing, part 13

SEQ ID NO: 135 - DNA, 1466631 bp, Homo sapiens
  source 1..1466631: mol_type = genomic DNA
tgggagaggggagttgaagatatgtatttttttttcttgtcaagagagtctgttggaaagggcatttaatttatttgaacagaggtgtcagtattgctctaaaaaccataaagcacagaagacaaaaccatactgatataaataattcacctccttctccccccaatcactgccaattatattttgttgccaggaaaaaaaggtcaaagaaatattacaaacttctcaaatttgcataggcctaactcctctattgtagttattgcaattctttcttgaggctacagtagcagttagtactggaaagaatgaaatctgaagtccaaagaaccattcttccaagttataaatgaagttttgagatattattccctcaatcccatggtgtcaccattataaaaagcaattaatatgatgtaccactgaattaatgatatttccataaaagggtgcatagtgattaaaagactctttctgattttagaaatgtgagagtatgacaaaaatgcatctgctagaatggcagaagtctgcaagtcttctgttttcataggcccaagcaacctgaaatttcttagaatgaaaagtgccagcagccataacaggttgcaacttatccaagcttagtttctgtagcccttcttaaggtgagaagtaggggagcaggttttctgagtcttatcgctttctttctgaattgtggctttgtaggggttccttgtcatccttcatctctattttaccaggttaccaagctttctacagaagctggctctttctggctacttctatcacagctttcctgtcaactgggtttttcatcaagttcttgagttttgaatcttcttcatcttatcttggatcaaatgtagtatctccaactcaattctacatctttcaccaccattttctctgttctgcccttagaaaagtgttcgctcatcctgctgagattcaaggagagtcacccctggctagtgagtaatcacatttagacatgttttgtgttgtctctcagacccttgtttggccacatgagcagctccacagagaaatggtcgatactattgtagatattatcatatcccactactcccttctcttttgtttagcatgatatgctactgtggtttatatcaattcttggctggctgtcagtgatgccagttgtgctaaaaccatatttagcagacctaaacacagtggtccatgggatagcattgaattcaatggctgccttagaggttaacacaatgagatctgttttcaaggggagagagggaaacctgacacaaagaaaacttttgagagagtcctgggggaacatcatatgcatctggtatgtctgaaacatttggagtctcctcctctgcaagtgaatacacatagcctgtactgtatgtgtcactgctacttcattatcacaaatttttttcaggataagagaaattgagcctaatagctgtcatatcatgtcttttaacactccaccctcttatgctgaaggaagctacaatcatccaagtgggaagtaatgtctaccgatgttctgatttaagtgaatgaaggtcttctttccacctcgggaaatcttgagggttatgtaacagcagctttgaaaggcttgtgagatgtactttgtgctagtccatctcaaatcttcaccggctgtaccaagaacagaaaaaaaaaggaatttggtgagtactttataaagctaaatttactcaattaatttcacctctgattatgtttttcatgtatcttgggacattagaatgtcctgtatttataaatgatgatgaggatagagagtaaatattttgttttgctttgtcttgtttttaataaaatacagaattagcaaacctattacagcctatcatatctagtccatgaaattcaatacctagataagtacttctacaattcatgggtgctccaaatactagagaatgcttataatgacacaatgtctgacacagaagagtatttaataaatgttaattatgtcactgttgttcccaccaagaaaactggtcatttggggatgttagattgtgttcttttgagtttcttttttctgatttgggaacaggggaatggagggtgaaattgccaatgactgttagtgaaggaaaagggaagatgtgtggtgtttacagaagtatgtgtataaatcaacaggctattgtcagatatatgttttttaagacagcacaccagcagctgcatgtgtttggtaagttaggaaacttaaaagtgcctgccagttatgcagccaccttttgagcaaagctgctacagaaggattattatttcagattaccatactttataccacaatattttactactctggcaacagctgtttagactaaggctaggtgcctggggttttcttggtgatgaggtgacctgggttgaggtatctgcttaaaactcacactttacacttgatagtgtctaaacatggcaaagatattttcatctttgaaaatctaaataccaacattttgagaagtggcaaaaggaagtaaaaagtatagacatgaatttatccatctactcattttattctataaacaatcattactggagccacatcaaaggatagaggaggtgacaaggataagaaataagagtgcctgcttcataagagatgagcactctacttttcatggtataccagaatgtctgctgtatcctgaactaaaacactttcacttttatgtgatagtttctgagttcttttttattagaagcaatcaatgcgctcaactaacttaagcaataaatacattattttaccataaagataagagcttgtctcacatcaccaatatcaggaaaattgttaggtacaatgaaagacctgtatccagggccacagccatgaggctgattcctttctcctatctctgcacctctccctgcttcaatcccttttcagggagtttctttttaagaggaaacagtacgccagtttcttctacttctcccgttgtcatagcctaaaatacagtggctctcagtcttcacattacagtctgaccatcagagagacaaaacttcaccactgtgtgttccaaattcccagggaagggttttcattgcgcatgaaagcaaccattctcactttgtggctagaaaaggaagctactttatgggaacaaagttctaggctgaaaattcagtaagtgtccaccacagttttcctgcatttctacctcttttatacaatgcaaccttctattttttgaaacctgaaagaccttggaagaataaaacatccctacctgtaaggtcatttctctgaaataatttatagctgattattgaaaataatggtggaatgggggtgtttatgaatggtattatatcaagaggaccaagaaatatccacatttgtgtctgatatatccataaattccctagtagaaggatcaaagaaaaaaatcttaacactgtattttcatatgctttttattctaagacacttctttttcttttcttttcttttcttttcttttcttttctttttttttttttttttgagacagagtctcactctgtcgcgcaggctggagtgcagtggcacaatctcagctcactgcaatttctgcctcccaggttcaagcaattcagtgcagtggcgcaatctcagctcaagtgattctcctgcctgagtctcccaagtagctgggaccacaaggacgcttatttttaagtttcttaattttaaatgtgtaactaataataaaggaaatttgacagaaaagctatgacccaataatcattggtcacacatggagaaactttagcatatgagaagttttctattcaatccttttgagtcatatgtattggtagcacattttaacttgttatgcatctttaattgttacttaaaatgtgttcaaagatttacaccagaatcattgtagcaaaaaattcatgatttcacagaaggctgcctgttaataatcaaaggcagtatgaactgctaaatatcttggattaaaataatgctcaagagtttcaagtaggaaagacttttgtgactggttagtggttcataaaattctgtcattcaaacataagcccattttctgtcaataccattgtttaaatatcaggatatacatgagttattaggaagaaacatacaaaataaattaaaccaagtaataaacacatatgaaaacttagtgttcttcaactagcctcagacttaaaaggacttagttaatcaagatcataagcccagttaacaaaaaacagcaagaggatatcataatttctgagtccaaaagagattttaaagatgcttaaataaaaagctggtaactaaagagaaaaatgttatgtaattttatggatatatgtatattattttctattaagatttttaatatgttcattaaaaagagtttattttttcccaaagtacagcagtcatatatcttatgatgcatgacattctagactagataaaatagagtagaaaagcaaactttgttcctcaccccagtgatgaagtttttgttgctgggctggaccatatagaaaatctttttcctaaattggtcgtgctgagattcttgctctgcttcgacctccaatcattaaaccttgctttgattctcatcattttctggcttcatggtaggaagaggcagaagtgtcacctggggcacttcatttttgcaagtattgctccactagcacagttagcacagtgaccccacctattgctggaacctaatcagttagaaaaatagcatcccttggggattgcatgggagaggcaacaaaggttgtgaggcaaatgtgaggtacagacaatagacaacagagaataccgtattctcagagagaagaaaaatcactgaagggagggcaatagaacttgagttggatcttagaggacaggttgaattcacataggtggaaaggaagatggaggatattttaaagtcagggagtaagtagtggaggaaaaagcacaaatatgaggatagaggaagctcctttgaaggggttagactggagagttagtgttgtgaaagacgtttatgcttgctcaaagagagaactttattaatttaagctctgtcagtcaaaattaccctccactccattgaaagcaatacacaatgttatttatttgattaaagtagttcaaaaatcactagtgcagagatgaactataagctctatgtgaacaggcactatctgtattattaaatatggtcaaaccacacccggtcaatacagtgtctgacacattgcgtatgtttaacaaatacttgttgaatcaatttctgtgagtatctaggtgttctgagaaactcaagcatcaagatgctggttagacccacgttggcacacaggactctactcaataaaggaataaagttaaaaattaattcacttccgtttataacacagtgcacacaaaaagaataactcagtatttaataacaaatgtgtaaaataaaaatctcctctttcatttctgatattgataatttgtcctttctttttattctgaatcattcgttctagatgtgtacctattttacagatttttttcaaagtgccaatttttggctttattattttctcgaatatgcttttattttctacttcattgatgtctggtcttaccatattatttccatccttctactctccaagagttgttattttcttctctgttcttttaaaatggaaacaaagaaaagattgtacttgacaagataaggaaacagaagttgattctgatcatatcaccatggtataattccgataatattgctgcaagaggggagagagcacagctgaagcaaaaggcaggagagttttcaggagctgggcaagtgaaactacagaccatctgtgtttggtaattggctttacacaaaggaaaagtaaactttctctaatcttctgacagtaggaaaggcaccctctggagttaagctccttttctcccacggatattgggatataggggccatttcttcttgatgattacctttcaaaaggatagctcccagtacttgaggaagggtcctgggctgtgaaactgacaagagactttttaacagatttagatcgcaaaggtgcaaagaaatattttacaataaagaattttctgaagcaattattctaagaggatggaggacaagacttagagtcaagaagaagcctgtgtaaagttgagtcaagctgaggggaaaattaaggcacaatttattttcttcttttctaccaaatgtttttaaactatatttctctaacactgctttagctgcaaaccataagttttaatgaaatttatttagttcaaaatgttcctaatttccattgtgattcctcctctgacccatggattgtttaaaaccaataatcatactaataatttttgattgggatgttccaaatatgtcaattaagccaaattgttcaaatcctttacattctaccaactatcttctgcttgctctatctgtactaatcacccttttaatttaggagttggcaaatgcttagaggggagattataggcagattttgaagcttagttccctgtagtttccttctctctgcgattttgtttctcaaatttttggctgcttgggaaatgtgaatttcaacgtctgtttaagtctaagccccatgtaataaccactttctacttggatttcattcctctcttctattagttacattcatgatcaccatacttggacacaataggtggccaacaaatgttttctttccttttcaataattgtcattagcttgacctttctgaggctggaaagtagactcctgccgtttagaaagatttttctaagtctactttttggcttagtagccacacctggagaggaagcaaacattcacaggccaccaaccatgtaccaaagtgggaaaatgatggcttgacggggcaccagtgagaggacacagagagctaccgatgaatacctatactagaaaatagtaagttccctgaattatctgttatgtacccgagttgtgttcagtaggactttttgtcgcaagtaagagaaatacattttaataagccagggggagcttaacagaggattattcatccagaaactggaaaatcatcttggcccaatgtggtccctgtctcttcctgccatcttctcactctacccatagtcatctatctctccctctttgttagttcagctttctcgctctccgcagactggcttttctaccttttcatacataagagcaaatacagtcatgttcaaaagcctgccaacatgactgcctggaaaattctagtccaattacacactgtcagagtctagaaatataagcttgactgctggagcccagggtccagggtgggtgtggaagaaaagtgtgggactgggcgggaaatgagctgcaagtgctgttgcagattcacagttggtttaagcactttaaataatcagaacaaagttagtctccaattcccctcagggaagcattccaatgatgtcagctaagttccattttgaacaaatgatttacagaccatgtgtctccatacactgtaatggcatatcatctgtcttcatctgacacttccttaaagggcaacagggatgagacaattaactgttgtgttgaccttgtagagctctagtcctcagcctcaactttgttattaatcttatgtcatacagaacccagccctgttaagatacccaccctaaccttggtcacagactaaacttgtaatgcctaccatgagcaagggccctaaacctaaccatatactgagagatggaaattgtcaacttatcacaaaatctataaatttggaaaagagaactttacttcttatgaagggctacaacttgcaggctgggaagcacagcctctggtagagaccgaaagtagaaactttgagggagggagcgtgtcactgagttttatacttggctgataagttagatatacatatttatcaggttacaggaggggctaggaatgttcatgaggggaagtcacaagcatgtgtggtaagcaaacatgttatgtcacatagtaccaagttcattttggggtacagacttaacatcaaaatgtgataaaattaggctgtatatgtgaaaatgtgaaatggaggacgcagagatgcctcacacaacctccatgaatccctcagaaccattccatggttgctggtcacttaccaggaaggaatgttgatcagctgttgtgtcaaaaccacaaaaggggaggggatccggtcaaggtgcgaagctattggttgaagtcggtggaagagtgagttattccttcttttttttttccagggctggtttctgtttaactcttagaacaaaaagtctaatggcaatttgggagggagggggtgtaacgaggcgtgactgattcccacacccatcatggctagaaaacgttgttgctaaggtttctctggggtctccttggccaaaaggggtttgttcacttggtcaggggaattaagatttcattttcatttcacaaaatgctttgtgctgcatattgtactcttacagcttaggctcagcttcagtgttcaacacaaagtagccctggaacatgaccttaaccctgcatgttcctcacttacataaatgagactctcatttgaaagcagttaaactacatcaggccatgatggtctgggtagacatcaactaacatggaaaagtcaaatattttttcgctcacagttaaaattctgaaacgcataaccaagtgttgcctatagttccagatggcattattctgagtttaagctgaatatttttgagatagcaaaatataagacatgcgaattatctaatttaaaatgtaaaggctgatatacataatcaaatgatggacgaaatttttctctatctgaaataaataatatttttaaattagttgatgaatgacagatgctgtgcttttctttgttctgtgggccccaaaggcttatttcccatcctcctcgccccttgaataaagtaggtgacaagaattgtagattttctattaaattgtaattgctttcaattttcaaaagagtatttaaaatattatatatataaaaagtgaagaatgataatttgaaaagagtcatgatacaattaaagaaatagaactctaacagtacacttgaattctgtttactcctacccaatcacattcatttcctcctcccttcaagttactatcctcttgaatttagcatttatcattgccatgcatttctttatacttctactatgttacatgtatccctagcaacatttagtactgctttgtataagtttacactatatgtaaatattatatattcttctgtaacttggtattttccttttagcataattttgtgagatttatccacatgtatgatattttaattttttactataatgtattcattctacttgggtggaaatttcagtgttttttccagtttcttgctaggtcatgctctttatacagtcacatgcctcataatgttttggtcaacaacagaccacctatgtgactgtggtcccatgagattataatactgtatttttactgtaccttttctatgtttagctatattctgatacacaaatatttatcattgtgtaacagttacctacggtgttccgtacaataacatactatacaggtacgtaccctaggaacagtaggctatatcatgtacccaaagtatgtagtagcctgtaccacctaggtttgtataactacattctaggatgttcaaatagtaatgaaattacctaaccacatttttcttagaatgtatccccaatattaagtcatgtatgactgaaattgctctttgccttccatttttgacctccaatttcaaatagggcatctctagtaggctttgagggaagcaattatacaaatgtagcttcaagaaacaaagatatttcattctagaagcaatgtgactgtatattaagcataagatatggtctataggtaaacatctttgtctccattaaaagacaatttatttattgatggaaattatattctatacctcagtttcctcatttgccacaagggataataatggtacctacttcacagggtagttttgaggattaagtgggttaatacatgtaaattgttacgacattgctttgcacatagtgcatgctgttgccatttttatcattatgataacttcatgggaaatattttgctatttttatatgtactatagtaactttatgagtattgttttatatatcaggtagcctgttcttcctgctggatttggatgttatgtattcggaggcatgaacgtaaattgtttgtgaaaatttccatccttcataagcttaatttcaaaagatagcctgtcatctctagtgtttattcagctgatatttctaagcacagctgtaagaatactgagagggtttttgagctgctgtgaataaaactgttggtggagggcaagctagagttgttaaaagaggtgacatgtgagtatacagcagggtctttcaagggattgcaagaaggtgcatctaccaaggccttcaactcttaaggagtcagttgactggaagagacttgggaatgtccacttatatcattccatttcagactaccttagattaatatgggttttgctggttcctgaggacccagatccaaagggcctaacccaggctattggtctttctctggcaagacacacccaattccctaaatgcagtggaggtcagcaaataggtttcaggacactttattaaaaatgtttagttcccagagcaaacttgtagccacagtaatatgatgctagtggcttctctgtagttcattgctaaccaccagggcagatgcccaaactgccaggtcagtcagtctcaagatgtggcaaaggtaaaactccttgccctgtgtatatgtgagctccatctccttcagctgtcactggatccctgggctgcctctactttccaccttcagagaaatttgagtggttcacaaaaatgtctaatttacttataaaagcacaatcatttcagagacaccagaggattatgtttggcagtggaatctgaaatgttgcttttttctttcactgtttctcagagaaaattgttctttttctgcaacttaataacctcaagcaatacttcgtgaaagctctctttgttcttttggattttccaagccctgcctggggaataaggctcacatcgccatttggaattgccaccactgagaaggaactgtgaattggcatgcattagtattcaggtgctttctttgaaacattcacagtgttcttccgaggaatttttaatgccacagtgatcccatctctgcgtgactattgctttcttaccaatatgcctctagaccttctgttctttctatttcaggagatagccagttgctaagcctctttcacatcatggcagcaatgaatccttagttaattgctccctctactacctcagaaatagcaccaaatgcagaaatgggacccttttcagaatatttcatcaggaactcaaacctcataaaagagacttcccttcttccttctgggtagcagcaacatatcattcctgtggggtgtcctttctcactgcactgaatcattaaatctgattttgtccaacctaaagcttgtctctggtagtctttagctgattaggctttaacagcaagatcgcttttacaaccacaccctcccaccagatcatcctgaccagtctcagtttagtcctactaaccaaaagaaatgtatttgctgcctgcttcagaccaggaaaccaaccctgttgtactcacagaatcagaagaatgaaaatcagacattataatgccagcaggcctctgcagtgctttcacagcccagggaccttaatacatttatcccttccatccactacttctgacacacatacctgagtgagacacagagggatgtgtcatatcatctgaaaaaggagcaagttttatcatctcagaatcctcctcacacaaagcaaggcccggcatagggagctgaatcaatacatatcactcaatgaaagttctagaccttcaaatataaaaggtaaataagaaattagggggcagaggtgcagaggtagggtggaaagtagggggatgaactcagttttttgtttgtttgttttatgagatggagtctcgatctgtcacccaggctggagtgcagtgatgcgatctcggctcaatgcaatctccgcctcccaggtacaagcgattctcctgcctcagcctcctgagtagctgggattacaggcacgagcccccatgcccagctgtttgtctttttagtagagacggggtttcaccatgttggccaggcaggtcacgaactcctgacctcgtgatccacccgcctcggcctcccaaagtgctgggattataggcataagccaccgcacccagcctgaagtcagttttaagtatctagagtttgaaatgcatttctcttaggcctttttaactgatatgttagaattagtggtgctcaaatattctcctgccaagtagtgattttttacttcctcactcaccccaacctgccattgaaaaaaatcaattttgctcatttgcaagtcatattgagatctcttttacccatataaatcagtgttgttttaacttctccttcaaaccagttacaacttctgcctagttccctcctatcatgtgaatcaaataaaatatttattatgtgttcaatcagtatgagagtctgattttacctttttcttaaaattatctttgaacagtatctattttgtacaattgcccaggggtaccttatacttaataattattctggttccgtccatgaataaagcattgaataacattaagacctttgtagaggtttctctaaaatatttcaaaatgttctgctttatacaccaacttacttcacttctctgcaaagcaaatttgttgcactgtggggaagttgaaattgtgctatctcagggaagacttgcaaagttttcttgttgaggttgcttagggtcaaaaatgtgtgtgatcagctgttttgttttgcaggattattgtttagggatgcatgcttctttatctcttctcagcatctctcatggttctgatttatatttgtagagcaagagaatgaaatggtaccatcagcatccctctttttcagattctttctcatatccttgcaagacttgcctccttttctctggatctgtttttctcattcccctgtgataccagcccttaggaaaaacttttgtgatcatttcttcaaagcttgaaacatgcaaagtgctgaaaattacaatattatctctttttcctgtgctctcaaatccagagatatgcactatgtggaaataaataaagagcacccgaattagaacaaacagagactatttattcagagcttgctatagcaagaaagtcagccaccatcacttgaatttggcagagactcaaaggcatgaaggaaaagctttagagtgaacaaaagtggtaaggggaagctggagggagctaacaaaaggtgtagcatcttatgtgattagtttgaagagtatttggctttccctggttggacctcaattggaaactggggcaaaatatagaagctgccagtcattgaccaagtcctaacttctctgggccaattgctacagaggttgtcatttggttttcagtgcttgttgctgctgaggttgtgggtcagagttctaccataatgtatggtgtgtccattgtccatttgtatattcaatctgcctagcatatttttataatgttaaatgataactataactctaaagagatgcaaaggaacaggctatttgaaatccttgagaaatttgagtttcatcccgttttatgttactattaatttttcttgatcatccatgcatccatgattacctagcctctgtgccgtgggttttacttatgtgatccttgtcaggtactttttttgttgtggttgttgttgttgagacggagtctcgctttgtcgccaggttggagtgtagtggtgcaacctcagctcactgcaacctccgcctcctgggttcaggagattctcctgcctcagcctccaaagtagctgagactacaggcgcatgccaccacgcccagctaatttttgtattttttgtagagacgggatctcagcatgtttgccaggatggtctcagtctcttgacctcgtgatccgcctaccttggcctcccaaagtgttggaattacaggtgtgagccactgcgcccagccatcaggtacatttttatcttcttttcatacacatggagactgggattcagatatgttaacaaacctgatgtaaactacacagctaagaaaatgagggtacaaaaatgttcatacaaatcttagatccattttctagaaaacgatgtagaaggatatacaccaaatttttaaccatgataacctaaatcttactaacttgagaaaggtaaaaatacattttcctttgtgcattttttaatatttggtgaaaataagcatggattggttttataataaaaagaaaattaatctaaataaacaacaaaacaacatgaagttgtattttctctagacactatattaacttccctctgggaatctaattcaaaagctatttcataaatgaaaatcacaaagaaaatttatcccagataataaaccagcattagttatttgaagagtgactctctctgaggaagtttacacagtagaatattaattgcaggtaacaaaccaaaaggagcaaaagaattgtatattcttaagagatattcccatcaagtataggattttaataaataataattctaccatatagctcttttgctttttggttaactgatgctactcattgatcaatttatcaaatattacttgagctactaatgtcttaggcatagtgttggtacctgagaataaaaataaacaagcaagtaaacaaaccaactattcattttataaatttatagttttccggctgttaaaatacaattttaagaaaaaagcaaaatcatggcttacagagatataaaaagattaatgtgtttaagatttttatttaacttattcatgaggaaactggtaagatgttacaatcagtgcaaaggtgagtgtaaagaacagacacatttttgtttcattaacattgcaatgagtatacaaatggaagcaaactgactttctcagaaataaaatctgccaatatacagaattcacatgcctgtctatagatgagaattattctgcatcattatcagttatctacaatttacaaagttgtaaaatagctcccatagaatcagaatcagataaccaggaacggaatgcaaagttttccactgaagcaaaaatttttccctacggggcaaagagaggctataacatgtgtggcagacattgttaactgtgtgctctgtgttctttcctgcaccacccctctctactaatagaatctttgcttgtttaggtaaatgcaaagttccctattcttgtccccacaaataaaacaatgataacccaacattgatatagtcagtaattggttcaggataagcttcaattttgcccaaaaaagaaaagtgttttgttgttgttgttgttattgtggttgtttttaatgtaagacttctaggaaagcatttgttttccttattaaaaaaacagtaattaacaactgatatagcccttttttggttcttttctcccttttttatctcgaatatagtgtagttactagaattcagcagtcattttgtggcgttggactgaccagcacaaaaactatatgaataatagttgcactagtcagtttgtgcttctctaacaaaataccatagactaggtgacttaaacaacagagatttacttctcacagttctggagtctgggtagtccaagaacaaggtgccagctgattcagtttttggtgagggtcctgttcctggcttatagaacttagactcctaaattcaagtgatcctcccatctcagcctcctgagtagctgggactacagatggttgcacaatttttagttgttcttaaaagaaagattgtgtgatgtaccataacggaaatctaattcccttttccctgtaacctaaatttcatctaccttgatatcaacacatcttcaatgcttctgccaccactttctttaattttatgcaagaatagttcaattgagacgtagagaatgagacagagagagagagagagagagaccactctctagtcttttctcatggcagtactaatcccatcatgaaggtatcagattaagaaagtatcctgcctgtaatcccagcattttgggaggccaaggagagtggatcatttgaggtcaggagtttgagaccagcctggccaatatggtgaaaccccacctctactaaaaatacaaaagtcagcagggcttggtggcgggcacctgtagcgtcagctactctggaggctgaggcaggagaatcgcttgaacctggaaggaagaggttgcagtgagccgagattgcgccactgcactgcagcctgggcaacagagagagactccgtctcaaaaaaaaaaaaaaaattagacaaaaaatcagataacacaatacaaaagcaagcaacttaagatctgaaacaaacttgtctatttacacttttggggttccataaggaaaaacagagatttctccgcaaaacggagtctggcaccttctccattttctgtaaggaattgcaggctattataaattattttaggttccttatacagcagagggtgacaagagaaaggagaaacagcagaagtaaatgaaggaaacagaattcattcaattgaggaaaaagcaaacaaacaaacaaaaactcttgttcaaaaaggcaaggtcccaggagaaaacaaaaacaaaccatgaaggccttttaatacaaacacacaggcacacatacacacacatcttggatgttacatttgcattaagctaatccattgagctccttgaaaaaaaaaactttttaaatctcattaccatattttagcaaagacaaattgccaatatttcggaagtaataagtatcaaatctgaaagggtttgatttagaaaccaaacccaggctattgtggtaaagaagaaaaaaaacagatgtcagaaccttagctatgaaactacaatgtggggcaacagctattgctctttcagtttgacttggctagcaaaaagatggccttgttatgtaaataaaaccccttaagtaatcaaaataaaacatttccccccccctttttttgtggaaatttagccacatcagaggctttgttccccttgaattggaactttccttcagatttcgtcaagtcagatagagctggtcaaatgcaatgggaaaaagactgaaacaataaaaacagaaacaaacaaacaacaacaaaaacagttaagcaaaacaaatgatcacacaatttatataattactgagcactctaatggtaaggagaaattaagaccagctggttgttcatcttaactttagccaagacaaaaccccaattcagctacttacctgaggatgggtctcaggctgaagactgctctctaccatcctagaagcaggaaaaaactcaaattcaccttccttccctgttggaaatgagctcgaattccagaaagaagttacctgccttccattgtcgtggaagcaggaaagcttgccttccttgttggaaggaagtaaagcttcttccaacaagagttggaaataaaaattatttttcctagcaaaataatctttaaatattgaccagattttgggagatcagggattctctggagggggagcttccaggcctcagcaaattgtcctactggtttgagccataaagaaactcaagctggtaccaagccctaataggagatttctcaaaggtcagcagctcttccactcagaatcccttcgtggttagcaaaatgtgaaccccaaatatatgagatgggtctcagtcaatttatagtgtttattttgccaatgttaaggatatgcccatgacatagcctcaggaaatcctgagacatgtacccaaggtgatcagtggtacagtttgcttttatacgttttagggagacatgagacatcattccatatgtgtgagatgtacactagttcagtccggtaatatgggacaacttgaagtgggagcttccagattagaagtagataagagacaaatgattgtaatcttttgagtccttgatcagcctccattgaatacacaatttactccagctcagtgaatctgcatttttacataaatgattagcagaggaagcaatgacacatgcatttgtctcaggtaagcctcagagggatgactgaatagaatgggaagcaggtttaccttaaacagttcccagcttgattttcttctttagcttggtgattttggagtctcaagatttattttcctttcacagtactctcagtcagatttcaaaaaagataatttccacacacttgtttttttattttttttattttttttatttttttgagacagggtctcactctgtcacccaggctgaactgaagtggtgcaatcacagctcactgcagccttggattcttgagttcaagtgatccttccacctcagcctcccaaacatctggaactacaggcagttgcagattttagttgttcttagaagaaagattgcgtgaatgcaccatatcagaaacctaactccgtttcccctgtaacctaaatttcagctcccttggtatcaacacatcttcaatgcttctgtcaccattttctttaatcctatgagagaatagctcaatattacatcccttgtactaggtgaagttccctcaatgtttccatacattttgggggtggaagggcttatggttctacgtttctttgtttgtttgtttgtttgttttgtctttactacagtctgcatctctctcccacaagcccagccattgttctcacatggctctagccatgaaagatagcatctccatatttcatccccaaaagggtcacaaattcaaagctgtgggtgcagttgcttttaacaaagctttgaggtgaaagaagagggtcctgaagcatagtaaacagagatcaatgtagtttaccagtagatccgaatggatttaaagttctttaactcctttcttccatgtagaatttctcagttgacagcttatctttcttccctgccattttcctcactactactctcttctctcgccttccctgccacctccatcatctctcatttcttccccatccccacaggtagccaagttgttgggactctcctattgcttcccacagctctggggttgcatgttttctcctctttgaaagttggcagtccccaaatctccaaaatcctgttcatttctaatgaagaactgtttaaatctcactccagttattattttaaactaagcgcagatccaaattcattagaaaataatattcagaaaatggcaaaatcatgactcatataaatgaaacatatgttaaagattttatttaactcatataaaggaactagttcaaagtaaatgtcaaaaagcacaaacatatagagtcaagaaatcgaattacaaatggagggaaaaagactttttccacagtggggagggaagccaatggaaatgctgctggataagacacagtttgcatatccatcagttacctgcatttgaaaaacaggtgcaaaatagctcaaagacaatgaacaggctctggaacccactgcccagaagcatgtatgatagacaatgcatagtttttaaatcaaatgcaaaaatgttttttgcacataacatatccaaaaattcttcagggacaagaacgaaaggttatcaagtcttcagggccgccttttctttgtcaaagcattaaccactgctcttaaattatacttttgccttcattaactaggaggcagtatctgagcatcaaaggatagcagttgatgcttttagactacttttttccaatgaaggcccaaaggtgtcatttgttcttccctgtctcatctgaattgtataaaatatgccagctgttgcttcccatggtcacctgaggtagaagtggctgtcacctctgctgacatccttagctatagtgtctttcatcctctgtgactcatctcaacccattaaatgtaggaacagatgatattaatagccaagggttaagacatttaatttcttccctattaaggaaatgcttcagcatttaaagtaataataatgggattgcagaatatcagagccataaggtgcctttgaaattatctagttcaatattgtactttccaaatgaggacacagaggtcccagaggggaagtggcctgtcaaccaaagtcacactgaaggctggtggcacaacagaagctgcagctcaggaatgccacgctgacctgccatttattttgccttttggcagctctttcttcatcggacacctatttcttttgttatgctctggcaagtctttcctgtccctctttgcagatatttatttttttctactcctaatgttcccagtgcttaattttttatggatttgtgtgccaatttctagttatataaggaactgatcacgaatgaagctctttatactaccagcaattattctattttggatataagactctgtaaaatctcattaaagaaatgaatttcccatgatgaaatgagtctttgaggagattttaaaatatgtccataattctctgacattccagttgtgttagtcctctttgtgctgttacaacagaatgcctgagactaggtaatttatttttaaaaaatagaaatttatgtctcatagttctggaggctgggatgtccaagatcaaggcatcagcaggttcagttatttggtgagggctgtatcctacttccaagatggtgccttgattgttgcatcctccagagaaaagaaatgctacgttctcacatggcagaagagcagaagagaggaaacccacctccacaggccgttttcataatggaattagtcaacccttgagggcagagccctcattgcctaaataccttgcatcaggcaccgcctgccaacactgttgcactgaggattaggtgtccaacacatcaattttggagtggcaataacattcacactagagcaatagccatcagaaagcagagtttagtttttctctcttgaatatggcattgaacaactcagttcttctgaataataggatgcaatggaagcagcactgctgaattataaggtgttgggtcatagaaggttatatggcttctttgtggctctttctcaggacacatacagtggcagattggagcttccatataaaaaaataagctaccctgaagacaccatgctggagagaccacatggagagattctttaggtatcccagctgttgcagcctccagatatttgaatcttcccaggacatgagagaaaaagcttccaaatgattcacacctgcagtaagagctgtctaagcatggtcaacagccagaactgtgaaagataacaatcataaacagctactgttcttttatgctatgaagtttgcagtggtttgttactcagcaatagatagttagaacagcccctttgagaggcaatgaaatattgggctctgaaaacctcagagtatagacataaaaaagactgttaaggaacagaggattctctagttaaccagtatgctgttgctatttcttcagcttgactgcatgtataagagctcattacagtaattcacttttcaacaggaaagtctgaactgatgataaaacccaggtgttcacaaagcataggtcctcatttcccctgagcccaaccttcattgatagtgaaaccatttctccattgcctcgtgaagcttctagtgggaaaggtcaatgaaacagagcatacttgcctataaatatctttttcctgatatgattccatgcaacctgaaaagccaatgatctaatttttgacataaagatacatcaatcatttgaagatgaaaactggttcagggagaggaagtaatttgtctgagatctctcaatatatttcctgcacaggttttgaatgctcggccctttcttgcttttttcccattagacttcaaagctgtaggtttctgccttcctaagaagctgaaaaaacagtcaaaagttttaaatcccctttttaaaacagtcattaaattgtaaaaatagcaataaaagtggcacgtctgctgtatatgtgatttttagcatttttgttcatttatttaccaaatgactgtgtactttataggcattactaaaataaagcacttaagaattggattcctcacccagaaagtgcctagatctgtgttaggatacaaagagtgcccagttctgagttagaattcggcaattatggaaaaaaagtttctttataataatgtttgaataagaaaaaaaaaaaaagaacctgactagtacctttaaatatacaaagaagcagaagtctctgatttgaagctacagggtcaatatatttaaatgtattaacttttccatagtcatgtgaagataaaaagggccagtcctcagcgacattggggaggtcaatctttgtcaatcccagtgtgctttttatgcacccttttgatcttttggctctcttccctcacacttggagcttctaaaccttcctattcttctcctctcctttctcaccattttgacttctgaatattcatttattcatcttctttgtgtagcaactttgatatgagtgaccatgatacatccccagcttcaggaggaacttaaatgaactaagctagctgcaataattaaattctccagacacagtgataagttcagtgtttgttggaagcagccatcctttccccataactgtgagtgaggaagatatggtaccagtctcttttagcattcatctcataaaaccaactggagaatgatgccaacacactaaaaagagcagaatcaataaaatcatagaggataaagatagatccctgatcaaactactcctgaaggccactctaatccctgcatctttcagctacttgatcagttactgtgtaagctgagttgtgttttctcttcttagcaaccaaaaataccctgagtgtaggtgacagtatcacatctcttcccttggaaggcccagtggaggttctgtttctggcaatgtggcaaagtacattgtttagacaaactctttgatggaaaacaactaaaagtgccagatattctattaaaaatacctctctaaagtatcaaaaaaatgacaaaatggtcagaaattattatgacaaaatctaagtgaaaactagaatctcagcactatagccacttttgtcctgggagtatttgcaaaacaggcaaaactgagtattaattctggacatttctttgagtgtgactatagacttcatgaaggcagaatatgcaattcaaagccccggtttcacctaggtagtccagtaggagaccaccacctctttaacctaaagctaccccttaaggtaaaggagaaccagaagtaaccccccattctgcttctaccttcaagtaatgacaagaaaatttgtcgtgacattgaaaataatatgagagtttctgaaaagttgcagccacagtgggccctcatttaaatctgtagcccaaattactattacttaggttatcactccaacacataaaaatcacagatttctagaatcgaatgacacaaaaggcagtgaactacgtaccaacatttgtgaagaaagtttctgtcatgggccatgaagaacaagtggtggttcggggctttttagcaagaagtggctccctgcagagctggtatggccagtaaagaaatggatccaatctgagacagaaaatctctcttagtttgtaaaacttgctggctttttcccactctgatggctccctgatgatggaggagtccaccagaagaggctgaggaaaacattaggaccatggtgtctccagcaggacaccaaagaactgccttgttttgcaagattttcctttggaatttggagtagagagaaaaatttgagtggcaatgaggtgaaactttacctgagccttgtgggctcagaaacagttggataatttaaaaacacacttacccttctgtgttctgggaaatggttagccaccaaggtctactctgccctcacatatttcaagataagaccagtctcccttctccctcctgattcccatagacttacagatgatgcagatgactccgttgccacctgcctctgtaaatctccaggccactttccttttctttaaaatgcccatcatgaatgggcatttctccaattgcaatagcctgggtaagatcatttccttaattatcctgtgcatttagtatttgcaaggggtaaatagaatggctctgcaatgggtgcaaatgagtaatatttagatttttgaaacatatgtcaagattctctaacaatgagctcatggctggtaatgaagtgcatctcacctagatgggaaaggatatgtttgctagaagctgactgatctaatcattagaacaattgtttttcagctaaatctatattcctgttagtatgggggatatccggtttgaaacactagagaggaaaaagaatataagagatatgctggaaagtatacgtacttggaattgggctaggatttgaatactaggctctgtggctaactggctgtgtgacttgaggtaagtgtggtgtaattgctcttctaagtggatagttcttttgttcttcaagctgaatcttggctgtcagtcaagctacacatcttctttcaggctttttgtgttagcaggtattttggttcccattcagggccctcttcatttatccttctcagtacagctgtgtgtaagctggcataatttgctattgaaacctaggctgtgactataaattaattaaaatttaatttatgattgcagagaagtgcaaatatggattcatcaggaatgaataactttatattactcttgtttccttctttgacagagactagctgggtaaatcagagatatgtggtagaaacaccctcatcaaaatatttggtaatgatactcatgtggatgtgaaggagatgaaatggctgcatgataataaatgtaggtagtgaataaccttaaaggatattcatgtaggttgggcatggtggctcacgcttgtaatcccagcactttggaaggccgaggcaggaagacggcttgagtccaggaattcaagaccagcctgggcaacatagctaaaccccatctctacaaatgaaacacagaataaaaaatatataaaaaataaatttttttaaaagcataccaatatagaaaaagctctgtttctatagaaaagtatacattgtatctatttggcccatccttcttggttacaagattctagctttttattttctttaagctattttatgactggatagacaggcaaattttgtcctgctcagtagagttttaattgactgctctccctctggtggaaaaaacagttttgtctccacatgcaatttactttctttactcgatacatatttgttctttttctctttctctttagaactggttataacatctacctggttctctcattaaatgagtaaaatacaatcttttcacacatgtttattcttgtatcagtgagagtcatgattctacacttttctgaaaactgtcttttaatgctaatgagaatggaaaccaatgattcactgttaaacaatactgggaccagaaatactttcctgtgtttgtagttaaccagacgcaccagaaaatacatgcacatggaagatgagactgagccaattaaaagagcttatctatcaggtctgaaatattactccttaagggtccttgaagattttgcccaactacatcagttccctttcatgccggacttgacttaaaatcacccagctcaggcctaaaaatcctgtaaacatccttccctatactctcctgttgggacactgatgactctattaaaatgccctacctagctgcagtaagtttaaagtctctcttttgcctgatcaacagttttcttggtagtctgtgtgtgtgtgttgggggggcgggggtgtggcgggggtattggaaattaatgacaggaattatgaccatccactgtttctaccagaaggcacaccctagatgcccaatttgagattacagagtcaagctatattgtgtgtgtgtgtgtgtgtgtgtgtgtttaagcagaagcagaagttaagtcaggcctccactccaggctaggaacccacgtggagatttgttaacatctcgcacaatgttgcacattcattaggtgcccaaatagtatttgaaagtatttgcaaatagtaagagacttttttcttaaaaagacaaggatttgagggaacagcttaaataaaagaaaaaaaactagacacagtttatatgattaaaataaaagtacatattagaattgcaaatatattcattacatttaaatgtacagaggaaatagagttcattttttttctttctacctggaatgatctgattgcctcttgggtgtcccctcccacagcacacacacaaacacacccacacacagtgtgtgtgagagaggtgaggagaagaggagaaaaacatttagctcaatctattaatctcagttcaggcttataaattgagtcctgtctttagtttcttttgggttggtgttgcatgcatgggaggagaggatatttggtttctgtgacagtaggggaaggtcttcatgtcccctctgatctctcttgcagagtgtctactctagttggttgccaggagccctgcaccaagttactcctccagatacctcctgctgctgctgagcacttgttcccatcacctggagcaagtgaggacatgcaatgtttttcctaaaggctcccagagattccgatgtgtcccccaatccccgtattcccaagagatgatgtaacttgcccctaaattttcttccctccagtacaaatcccagtgtctctgaagccctccctctcccgcctgggggaggaaaaatgaagtactgtagctttatctcttcaatagctttattttctccccacaaacactagaggctctgcttccacttcctgtctacctgaaacttcccaaatataaaatgaaaactggaattcaaaactgagagcatataaatcaatttctaggtcttacatttatttcagatactcttcaaatttgagcttcttgaggaggaatccatgattttaagtggatgtttgtttaaatcttacctttcacactctcccttctcattttagtaaagataaccatttatttccccacctgtaattgtactctgggtatgaaagtctccggcacactgtacaactgagagctgaaaaacacagactatctttaagaaggggtttttagagtattattccaagacaacaagggaaacttttcatgcgcgtccgtgagaagagaccaccaaacaggctttgtgtgagcagtaaagctgtttatttcacctgggtgcaggcgggctgagtctgaaaagagagtcagtgaagggagataggggtggggcctttttataagatttgggtaggtaaaggaaaattacagtcaaaggggggttgttctctggcgggcaggagtggaggtcacaagatgctcagtaggggagcttttgagtcaggatgagccaggagaaggaatttcagaagataatgtcatcagttaaggcaggaacaggccattttcatttcttttgtggtggaatgtcatcagttaaggcaggaaccagtcatctggatgtgtacgtgcaggtcacatgggatatgatggcttagcttgggctcagaggcatgacattcctgtcttcttatattaataagaaaaataaaatgaaatagtggttaagtgttgggatggcaacaattttgggggatggtatggagagatagtgggcgatgtttctcagggctgcttcgagcgggattaggggcggcgcgggaacctagagtgggagagattaaactgaaggaagattttgtggtaaggggtgatattgtgggactgttagaagaaacatttgtcatttagaattattgatgatggcctggatatggttttgtatgaattgaaaaactaaatggattaaaggtctaagaattgggaggacccagaacatctgattagagagtgcctaaggaggttcagcatagccctgccagcaaagattatttatttactttaagagttaagagtggcagtttggggatagcaccaggagatatcagctgtgatgacttggagaaacagtgtaaaccggcagtgtaaacaagagcagggcatgtatgagtagttgagaacggtgaataggagtatgactagacagaagatagtagggatgacaagttttttggggcacagtccaagttggtctggtgtctggaatgacactgaggcctaataaaaaggagcgtctatacaggagctcaaatgggctgtaccctgtagcattctgaggacaggcctgaattctgagaaaagaaagaggtaaaagtattgtccagtcctttttaagttggtggctgagcttggtgaggtgtgtttttaaaagaccaatagtacattctacctttcctgaagactgaggactgtaagggatataaaggtttcactgaatactaagagcccgaaaaactgcttggctgatttgactaatgaaggccggtccactatcggactgcgtagaggtgggaaggccaaaccgagtaattatgtctgacagaagggaagaaatgaccgcggtggcctctcagaccctgtaggaaaggcctctacctatccagtgaaagtgtctacctagactaagaggtattttagttttctgactcggggcatgtgagtaaagctaatttgccagtcctgggcaggggcaaatccttgagcttgatgtgtgggaaagggagtgggcctgaataatccctgaggagtagtagaatagcagatggaacactgagaagtgatttccttgaggatagatttccatgatgcaaaggaaatgagaggttctaagagatgggctagtggcttgtaacctacatggaagaagttaggaaatgacgacagaatagaatgggcctgtgaggctggaaggagatatttcccttggtctaagaaccatttgccttgtgtgggaagagattgataggtggaagtttcagcaggggagtaggtgggagtggccagatgagaaggagaaaaactgaaagtgagggatataagttggaatgctagctgcttttttagctatcttatcagcataagcattgtcctgagcgatgggatctgatgatgcccttcgacggcctttgcagtgaatgactccagcttcctttggaagtaaagcagctttgagaagtgtttttattaaagaggcattaatgatagaggacccttgtgtagtgaggaaacctcttgcatggtggtgcaggatatggaaggcatatttagagtcagtataaatattgacgtttagtccttttgcaagagtgagggcttgagttaaggcaactagttcggcttgctgagaggtagtggaggagagcagagcagtagccttaatgatagatgtggaagatactatagcatagcctgcctttgctggtgagtggcgattaggcctggtggaaccgccatcaataaactaaatgtgatcagagtgaggaacaggaaataaggaaacatggggaaattgggtgaatgtcaggtggatcagacagatatagtcatgagggtcagctgtggtatccagaataatgtgggaggctggattgaagtccgggcaaggaacaatggtaattgtgggaaactcaacaaagagtgagtatagctgaaggagccaggaagcagaaagtatatgcgtcaggtatgaggaagaaaacagattttggaagttatgagaactgtagagagtgagttgagcatagtttgtgatttttagggcctctaaaagtattaaagcagcggcagccgctgcacgcagacatgagggctaggctaaaacagtaaggtcaagttgtttggacagaaacactacagggtggggtcctggctcttgtgtaagaattctgaccgcactaactatgcctaggaaggaaaggagttgttgttttgtagaagggattgaggtttgggagattagtcggacacaatcagcagggagagcacatgtgtttttacgagaattatgccaagataggtaacagatgaggaagaaatttaggcttgactgaagtaatgggggctgtctgtgaagctttgcagcagtatagcccaggtaatttgctgagcctgatgggtgtcagggtcagtccaagtgaaagcgaagagaggctgggatgaagggtgcaaagaaatagtaaagaaagcatgtttgagatctagaacagaataatggattgtggagggaggtattgaggatatgagagtataaacaatttggttgataaggggcagatcctgaactaacctgtaaggctcgtctggttctaggacaggtaaaatggggaaattgtaaggaaagtttataggctttaaaaggccatgctataacaggcgagtgataacaggctttaatccttttaaagcgtgctatgggatgggatattggcattgagcggggtaagggtgattaggttttaatgggatggtaatgggcctgtgatcagttgccagggaaggagtagagatgtcctatgcttgtgggtaaggtggggggatacgagaggaagacgcaaaggaggctttgggttggggaaaagggcggcagtgagatgcggctgtagtccaagaatagtcagggaagcagataatttggttaaaatatctcggcctaataagggaactgggcaggtggggataagtaaaaaagagtgcataaaagtattgtctaagttggcaccagagttggggagttttaagaggtttagaagcctggccgtcaatacccacaacagttctggaggcaagggaaacaggcccttgaaaagaaggtaatgtggagtgggtagcctccgtattgattaagaaggggacggacttaccttccactgtgagagtcacctgaagctcggcgtccgtgatggtctagggggcttctgaggcgatcgggcagcgtcagtcttcagctgctaagctgagaagatctgggaaggagtcagtcagagcgccttgggccagagttccaggggctctgggagtggctgccaggtgagttgaacagtccgattttcagtggggtcctgcacagatgggacgtggcttaggaggaatcttgggctgtgggcattccttggcctggttgccagatttctggcacttgtagcaagctcctgggagaggcgggcctggaggaacgcctggccactgcggttcaggcgtttggaagttcttgtgtgctggagatgtggctggggtttgtctcacagtggaggcaaagaattgcaactgagaaatatgttgctatttggctgcctctagtctattattgtacacctcgaaggtgaggttaattaagtcctgttgtggggtttgagggctggaatttaatttttggagttttatttaatgtcaggagcagattgggtaataaaacgtattttgagaataagacgaccttttgaccttttagggtctagggctgtaaagtgtctcagggttgctgtcaaacgagtcatgtactgggctgggtttttatatttgatgaaaaagagcctaaacgctctctgatttgggattaaaaaaaggagcattaaccttgactatgcctttagctctagccacctttttaagaggaaattgctgggcaggtgggggagggctagtcacagaacgaaactgtaagccagaccgggtgtgaggaggggaggtgataaaaggattatagggtggaggagcagaggctgaggaagaattatgacctagctcggccttgcgaggaagggagaggtcagatgggtcagtagaaaaggaagattagaaagactcagtgacgcttggggttgggactgaggggacatgtgggagggaaagaaggaagatttgggacgagttgcattgggaacagagaccagggagggactgatgtgtaaaagaatgcctggacgtcaggcacctcggaccatttgcctattttacgacaagaattatttagatcttgtaggatggaaaaaatgaaagtgccattttctggctatttggaacggctgtcaagtttgtattggggtcaagcggcattgtagaagaaaataaggcatttaggttttaggtcaggtgtgagttgaagaggttttaggtttttaagaacacaggctaagggagaagaaggaggaatggagggtggaaggttgcccataatgaaggaggcaagcctagagaaaagagagagacacggagggaaggggtttgggggttcttaccctccagaaaagcaggaaagtggtcggggtgcggaaataaagggttggggtgcagagataagaggtcggagcatggaaataagggatcagggcacagagataagaggttggggcatggaaataagggatcggggcacagagataagaggttggggtgcagaaataagggattggggcacagagataaggggtcgagtcatggaaataagggatcagggggttcttgtccccagaaaagcagagaaggggtagagacatgcagagaaggggttggggggttcttgctccctagaaaagcggtacttgtggctaagggtgaaggagaaggggttggggggttcttgccccctagaaaagcggtacttgcagctaagggtgaagaaggggttggggggttcttgcccccagaaaagcagagaaggggtagagacatggagagaaggggttggggggttcatgccccccagaactgcagtacttgccactaagggtgaaggaccaaggcaggcatccccacgtggtcagacacctctgaaacgtgggtaaataatcagagaggcgtccctgcaatgattaaacaccaagggaaggctgccttcctgagtccatgactggtgcctgagttttgggtccatggataaaacgtgtctcctttgtctctaccagaaaatgaaaggaattgaaattaagagaagggagagattgaagggtggcgccaatattgaaaggagatagtggttgagggatagtgagagaggttggagaagagagtaagaaaaggacgcttacctgatttaaaattggtgagatgttccttgggctggtgggtctgaggccctgagatcgtaagtggatctttttcacggagcaaagagcaggaggacaggggattgatcccccaagggaggtcccccgatccgagtcacggcaccaaatttcatgtgagtccgtgtgaagagaccaccaaacaggctttgtgtgagcaataaagctgtttatttcacctgggtgcaggggggctgagtctgaaaagagagtcagtgaagggagatagaggtggggccgttttataagatttgggtaggtaaaggaaaattacagtcaaaggggggttctctggcgggcaggagtgggggccacaaggtgctcagtaggggagcttttgagccaggatgagccaggagaaggaatttcacaaggagttaaggcaggaacaggccattttcatttcttttgtagtggaatgtcatcagttaaggcaggaaccagtcatctggatgtgtacgtgcaggtcacagggaatatgatggcttagcttgggctcagaggcctgacaaaagtaaaacaaggattctagaggaaatcaaagcctatgacacctacagctacacaaattgaaaatatagcctgacttagccagataaacacaaaacctcattctaacatcctatctacccaattcctattttctctctcccaggtctagacactaaacttcttgagggcaaacattgttgtttacttctttaactagcttgtgacaccacatagcaggtacggagcacatgcttaaaatatttgatgaaaggaggaaaaaggaggttgttaattgaatgaacatctacataataaaataaaaacctatttcttccatgattcaggcaattcacttaaagtgttgcaatcccacaaaagcctcccatgcttcctccattttagaaataaaaaacttgaagcttacagaacatcaggtataagcctagaaattggtaaggctctgatcccagccaagcccacctctcccacagagcaggctgcctgctgcatctagggcttccatcaccctgcccaaaggcaggaagtggagagacagaagcacaggggtccagtagagtctgagcttcctttcctaagccaggcaccagaatcttcatgaactttgtgtgtgtgtgtgtgtgtgtgtgtgtgtgtgtgtgtgtattttttttttttttagagacaggatcttgctacattgcccaggctggtcgtgaactcctggcctcaagcagtcctcctgcctcagcctcccaaagagctgggattataggcgtgagccactgcacacagcttccttcatttctgtaagtgtcagtgaaaaaagaatgtttgtgagttaaggagtagcagtagggactcggaagagactctcatttaggacagttttgacaatataagtgttgccagtttgcttcctaatgtttgcatggagaatggaacactgggttcaggtattaaactactgtagcactatagggaggatcagagaccaccatcgcaggcctgagcaacatggtacaaatcacggatcttggaaactgcgttggtgataataattatgcataattatgagtgtattctgctttaaagtttttcaaaaagtgaattaccagaatctttcagacattgtgtaactttttgctaaagttcaaaaacttatactgtttttatggcaatttttgattgatacttgttttctaatcttgggagaaaaatggaaaataaaggaaagttctaaaaggaaaataaaatcctccataattttaccactcatagttaatctctggtaatattatgatgtctttctttctatgcaagggtgtgtgtatgtatgtatagtacaaaattgccacattttgaatgatatatttcatatttgtatttatacatatgtaaacgcctttacttcctcctattttttccctaaaattgtaccatgagcatccttcacattctaagaaaacattattcttaatggctatgtaatatttcattatatcatttatatcacaatttagatgaccaatattctgttgctgaacatttaaatgtttccatttgttcagtgttataaattatagaaagaatcagaatcagcactttctaaagcctccactctttttaaatgggaaaacaatctaatttaaaactttgtgaaaatggaaatgttttatttcgcaccgtcctatagagtagccactgccctcatgtgactattgagttcttgatatgtggctggtgcaactgaggaattaattctttttattttaccttagtttaataaatttaaatttaaatagccatatgtggctagtgactactttatttgttaaacttgtgaggttaaggtcactttaaggatctgcttgtacgcaggaataccgccatcttgtggcctgttagaatatggcctcgaaaattgaaaccaaagtgcatttacacctgcaagcaccctggaagtggtaaatccatgatattcgtggatcataaaagctcaattcgtagcttatataaagtatctgcaagcttaaagattgcagttgctaaaacacaccatggaacagggcaaatgaatttgcagaggagaaacagtgagtgcctgggctaactctgagaataagtgtgtctttgccatttgggatagagacatccttttggtgaccctttcgtgaacagcaagaatctctaggaccttttggcacctgaaattcatcctttcttcctttgttctgctattcgaaagcgctctttgctttaaagtgctacagatactcgtatcctcctaggagttttcctattcatcttcacatatgtctattgatattgcctgctctgcagattcactctgcatttttgttagagttttgttgtaaattctagtatattttgcactttctttgactgattcaactcttaatcagcgcttcccccaaatctaacccacaattctcaaaattggccgtatatatatgtatgtgtgtgtgtgtatatatatatgtgtgtgtgtgtgtatatatatgtaaatgtatattgaatagatgagttctgagtgattcaaagggtgggaaaattaagatctcttattccaactaagtttggaactaattaagagattgctaatggtggaaggcagatgaagacaaaaacatccactttattactggcagaactgtttacaagtgtggctttgtggtgcaggaatgatagaaattctaacactgaatcccagaagtagactttctaccacctcaacgagcagctccaggaagcctcaggcctcctctggggtgggtccctgtaagaattacaggccacagagacaggccacaggagtgcatgttgtgggcaggtggcccaagtgagaagggccagatggaggaggcaaggagggcgatacaagattgtttagagtaagcagatgggcattgtacattctctacatgacaaggtattctactttggtagaaaaccttaaaggttggccagattgtctagggaaaaatctctcctcatagaaactgggaaattgaaaaaaagtatccaccctcatagaaatcaataagttatattctagcatgaccttagccaaatttttaactgtttcaccaaataattaaagcttcacctgagagctgtaggaaagataaacaggtatgtatttatctttgtacaactctgcacacattgttaatctttctcaatcggaagggatcatagattaggtgataataataaatactgagaaataaacaagcaataaacattgagattgaactcatgtttctcaaaatgctgcttcagtgtgttgggagactttgttaactcagcagtgacttctagtgcaaaaacattatcttataaaatttctagaaagcaagtcaattacgaaataaaggaacaaattcaataattttattacagcaataataataagctaaaaaaaatctcaaatttgttttgtttttgttgttgttttgacacaaggtgttgctgtgttgcccaggctggaatgcagtggcacaaacactgctcactgctgcagcctcaagctcctgggctctggcgatcttcctgcctcagccaagtagctggaactacagacctgtacctccatgccttcctaaattatttttgttttgttttgcagagatggagccttgctatgtttcccagacttgtctcaaacttctggcctcaatcctccctcctcgacttcccaaagtcctgggattacaggcatgagccactgcagctggcaaaaatataaatttctaactgtaggaattcactctaagggtatacttgcagttgtacttaacagtttattatggtgatatttatcacagaaatgtttataatcatcctcataaaatgatagccttaggagatctttttaatgtgctagcttggcaaattttttttttttaaaaaactgacaagtctgtattgtctccagtagcaaagactcactagcccatgaaacaataagtctaagaataaatttattagatctattaatatatccctctaagacttggtattagagataaaagtttgtatctatatggcttataggcaacccagtcacagataatcttctctagtgagaaaaggtgccaggaaattcactttgatttgagtcattgaatgtgagaacctctctaccaccagcccaggagggtacctgaggacacttgtggtcatggaagataacggctctcagaagtgtagagggtataggctgtgtggctatatagtactactactcaaagaaaggatttaatgaggccttttctgtgtccagagattaaatgaaaaagctgcccagcccctggcatggatctctgggaagagatggaaatggtgccccattccaggagagagttctcagaactggctgtgttcagagagccccgtaattgggagtcaaagcatgctgcttctctgattagacccagcaccaggaccaggattataacacaaatgcctcgagacaccaggcaggcgatataaaggcttctatgaggctgtgtgtaaaacacagacattaatattagccatgaaatgtgtgttgtcaaataaaccactactgagggtcagatttggcacacaggtggccagtttatgacccttgactgagggaatgagttcatccttcttctgtaggaatccttctgcaggaatctggttcagacaggcgctctacccagggtacacagggctgctgctgtgtggtgcagggccagtgtcaatatcagcagtggtgccacgtggcagtgaggagcaggagcgagctgacccatccagctttctacagatactggatcttctgttgatagcacaggtgggggacctgagaagttaaccaggaaaatattacatagatcaatacttgcacatacctctagttggaacattcacatcagtttcaagggtaactttctccctccctccttcctcctcctgccttcttttcttcctgtcttcctttattctctctctctctctctctgttcttattatggattgaatatttatgtccctcctataattcataagttgacatcttagttcccaatgtgatggcattaggaggtgggccctttgggaggtgattagatcagaagggtggagctctcatgaatggcattagcgcccttatgaaagaggccccagaccaaacacagtggctctcatctgtaatcccagaactttggaaggacaaggtgaaagaattgctgagtccagtgtttgaggccagccttggaaacatagagataccctgtctgtaaaaaaagttaaaaaaaaaaattagccaggcatagtgcaagtggtggagcacatttatagtcccagctactcgagagtctgaggcaagagaactgcttgagcccaggagttttaggttacagtgagctatgttcgtgccactgcactccagcctgggcaaccgagtgagatcccatctctaaaataaatgaataaataatacaagaggacccagagagctctctgtctactatattaagtcacaacaagcagttagcagtctacatacaacccagaaaagggtcctcaccaaaatccaacaatgctggcaccctcatctcaaacttccagcctgcaaaattgtgagaaataaatttttattgtttataagccacccagtctatgttactttgttatgacatcctggggggactcagacagttcttcttccatcttcagtttatgaattatcttagggtacattgtgaactcttccttctcagaattgatctttagcagagtggagaccatgttttcccagttagacgaagtagttactgagcatagttcaatttctctcatcagtctattttcagtaggcacatgctatcagtcacccatcagtaagacagcactccagggatagaaatctttctgctaattgcccctatatccatcaattgtttctctcttttctatttccattctcctattttcccacacccagaaaaatataaatgcaacattattgactggtgaatgacataagctgacagttggtggcactgcttctcaaccaaaatccctaatgcataagcataggaaaatatatctatctccttatttaccacaataaatggtctaagctccaagacatgagaattgttaggagaacagatttctggactcaaccccttagagattaatagaggcttcttgcaatctgcagatttaattaatattccaaatgattctaattcaggtggcccatgaattacaggaacataattttgaagtgaagacagaagagtgggacagactttgaaatcagtaataggttgagataaaagcattcttccgttgtacatttctgatctgaaagttttgccaaagtcttcaatgacaattgcacttctatcaatttcttttcaaatttctaatagcttttaagacatacaaatataaatatatgtatatgtatttgtgtgtgtatatctgctggtgcataaagggttatgtctgttgattgtcagaacagcctcaaatattttaatgattcctttcccattaatgagtaagatcaaaatgaatctgttaattttaccaaaccaatgaatcaccaagatgtttgtatatgtgtgtattaacattattttcaacgctttatcttgacatttcaatcatattgaaaactgaaggaattttaccatgaacattcaaatatctatcacccaggttccacaattaagtttactctctttgatttatcagttacctatatacctgtgcatcactctattatccatcaacccatcttagtttttgataaatttcaatgtaagttgcagacatatatacaaatattttactatgcatcttattaactaaatttcaatattcattattttatgtaaaacttacatgcaatgacatgcatgcatgcatggtttggatatcattcaatgagttcacacaaacatatacacctgtgcaagccaaatccttgtcaagatacagaatattactgtcaacccaacgagtctcctcatatgctttttcaatagctctccaccaccatctcccagagccaatcattattataattatttttaataaattataaatatttaaataaatatttataaattaagtttgactgttctcgggctgtatatatatggacttatatattaagctttatatatatatggactcatatatttttaatcacataaggttttcaagacacatccatgtggttgtgtatttaagtattttttttctttcttattgttggataatatgacagtctacaaatatactccagtttgtttatctattatatgtggtgaataaccaagctgtttctggtttttgactactatgagtaaaactgctataagcattcggccacaggtctttttgcggatatatatttttatttgtcttgagtaaatatctagtagtggaactgctaggtcacaaaatagatgtgtttttagttttatttaaaaatgtcagaaattttcatgaaacaggggcatcattttaactattttgcagtcgcactgacaatatgttctagtttcagttgctccatgtccttgctaacctttagtattatcagtcattttaattttagcctaagctatgtatacagtagtatctgggattttaaggaacctaattgtcagcttgtctttgaattaatcttgtcacttgtttttatattcagagccattagtatataacatctaaaaatatgcttgagtgtttactctcatctgtagaattactaggagatgtgtgaaaggtgagagaaaaagaaaaatggcccctgtcttttaggagtttatgttcttaacatttacaataggaggcaattaaatataaggcccatgtggctacacctgactcaaggtactgaaagatttgaatgaagttgatcattaccaaaagtcaactgctagggacatctttaagctggagtttgacaaatgagtaatatttgagttatagaataaagtgaggaatgagattggtttccactgggaaaatagccagaatgaggtactatgtgcagaacaagcagaaagtataaacaagcaatgaaaatgctcctgcaaacctatgtgcggctttttgcaacatttgttaaggcttttattgaataagccttttatatggaatgtaacaacaccattagatctcatgatgacatttgttgtgtggctgttttgttttgttttgctacctctttaaaattaatgtctcattttaaatcttataccacaaaatttaaaccaacatctctgtctactagttgaggacttgccctatgtgagaaatcaactgagtgccaaagtcttactcatgttttcttttattttggactttgaagcaccctggatagctctctacacatgtggagccagcattctaagaagagtctaatttcatctttattctttcaaaaacgagcctgaaacgaaactttatctccatcaacttgcaagctatttttccttgaaagattatatgatgtactcatgaaaaataaacttcactgtccgtcacacacaactgaatttatagatctgcctcttgagcaagttaattagactctctaaaccttgactttctcatctataaaactggaatagcaatagagcccaccccatagagattttgagagtattgcacaaggtcgtgtatgtaaagtgcttagcacagtccctggctcataattagtgctcagttaatgtcagttattttttgtggccacgtttgccagtttcacctgatccctcactctgttgtttccagatcacaggtattaaaagtatcagatattcgagcagatatagggagcatagcggacgttgtgttcaggtgccagaatttgccgatttttaaaatatcattaaatgcacctcaatcaatatatttcttattatttccctttttaaaaacaatagtccatttattctttggaatcttttaccatgaagtaaatgaacaaatccaaattgccctattaccaggctgaaatatgtttaaaatccatacctgaaagaagattgaatgtgaaaatgtgaaatattgcaccaggggattctagggtcatatgatgatggtggcagagctcatggggatgtttctgagatacaggtaacttcatcttagcaacaggctcttgtgcaacatgaatttgtatcccaaggcgctgccatgaactttgttttagtagttgcaaaaccattcagctgctcagatggagagctctgagggactctgggacaaatttcctccaaaaaaaaaaatcaagcctccagcttttagcacactgccaggagttgctgaaaagttctatgttaaaaatgaaaatatacctgggagggttatcacattcagcagtctcttgagcccttcatacctcagagtaaacttattaatcagctggattttcccttgaatttaagttcatgctcttgacagggattggaaaaaaaggaaaggtaactcctccaggtttgtccagacaggacaaacgagttttaatctgggcatgcaaacatcatgggtcaacgtatgcaatgaacccaggggtaggactagaaggcagaagtaataaatttacatttattccatcatttgatgtctgtggagaattggcaagccttctaatttttggaacatgtatgccattatctatgcaatggcgatattcatttctattctaactagtatttacaatgttagtgagaattgaatgagataatatgcgtgaaagccctctggatgaaaaataaaataaaataaacaatgttacaagcatacctcagagatactgcaagtttgattccagacaaccacaataaaacacatatcaaagtaaagtgagtcacacaatttttggtttcccagtgcatataaaagttaatgtttacactatatcatagtttattaagtgtgaaatagcattatgtctaaaataatacatattttaattaaaatactctattgctaaaaatgctaatgatcatctgagtcttcagtgagtcataatctttttttaaaatttcaacttttattatagattaaagggtacacacgcagatttgttacatgggtaaattacatgatactgaggtttggggtcccaaagatcttaccacccaggccataagcatagtacccaccaagtggttcttcaacccacggccctcccctttctagtgatccctagtatctattgttcctatcgttacaatcacgtacattcaatgtttaactcccacttatatgtgagaacatgctgtattttgttttctgtttttgagttagattgtttaggctaatggcctccaactccatccatgatgctgcaaagggcatgattttgttcttttttatcgctgtattgtattacacggtttataagtaccaagtaccacattttatttatccagtccactattgatgggcacttagattgtatgtccttgctattgtgaatagtgctgcagtgaacatatgggtgcatgggactttatgacaggatgaattattttcctttggtatatcctagtagtggaattgctgggtggaatggtagttctcttttaagttctttgagaaatctcaaaactgctttccacaatggctcaactagtttgcattcccaccaacagtgtaaacgcattcccttctctccgcagccttgccaacacgtgttgtttttgactttttaataattgccattctgactggtgtaagatgctatttcattgtggtttttatttgcatttgtctgttgacgagtgatgctgagcattttttcatatgtttcttggccacttgtgtatcttcttttgagaaatgtcagttcatgtcctttagctcatttttaaattggattatttgtttttgcttcgtgatttaagttccttgtagattctggatattagacttttgtcacatgcatagtttgcaaatattttctcccattctgcaggctgtctgtttactctgttgatgcttttttttttgctgggcagaagctctttagttgaattaggttccacttatcaattttcatttttgttacaattgcttttgaggacttagccataaattctttgacaaaacaaatgtaaagaagggtatctcctaggtttccttctaggatttttttatagtttagggggtattacatttacatttttcattcatcttgagttaattttcatacatggtaagaggtaaaggtccagttttattcttctgtatatggctagccagttatcttagcaccatttatggaataaagagtccttttcccattgcttatttttgttaattttgtcaaaggtcaaaagtatgtagtcatgtgtttatttctgggctctctattctgttccattggtctacgtgtctgtttttgtatctgtaccatgctccttgagtactgtaaacttatagtataatttgaagttgggcaatgtgattgatgcctctggctttttactttttgcttggaatggctttagctatttaggctgatatggtttggctgtgaccccacccagatctcaacttgaattgtatctcccagaattcccacatgttgtgggagggacccagtgggaggtaattgaatcatgagggcaggtctttcccgtgctattctcgtgatggtgaataaatctcatgacatctgatgggtttatcaggggtttccgcttttgtttcctcctcattctctcttgctgccaccatataagaagtgccctccaccatgattgtgtgaccttccccagccacctggaactgtaagtccaattaaacctttttcttttgtaaattgcccagtcttgggtatgtctgtatcagcagtgtgaaaatgaactaatacagtaaattggttccagtagagtggggcattgctgaaaagataccctaaaatgtggaagcaactttggaactgggtaacaggcagaggttggaacagtttggagggctcagaggaagaaagaaaaatatgggaaagtttggaatttcctagagacttgttgaatggctttgcccaaaatactgatagcaatatggacaataaagtccaggctgaggtggaatcagagagaaatgaggaacttgttgggaactggagcaaaggtgactcttgttatgttttagcaaagagactggcggcattatgcccctgccctagagatttgtggaactttgaacttgagagggataatttagggtatttggcagaagaaatttctaaacagcaaagcactcaggatgtaatttgggtgctgttaaagccattcagttttataagggaagcagagcataaaagtttggaaaatttgcagatggacaatgtgataaaaatgaaaatccctttttctaaggagaaatttaagacggctgcagaaatttgggtaaataatgaggagccaaatgttaattcccaatacaatggggaaaatgtctccagggcatgtcagaggttttcaccaggcagcccttctcatcacaggcccagaggcataggaggaagaaattgttttgttggctaggcccagggtcccagtgttgtgtgcagcctagggacttagcatcctgcttccaagccactccagccatggctaaaaagggccaaggtacagcttgggccgtggcttcagagggtggaagccccagaccttggcagcttacacgtggcattgagcctgtgggtacacagaagtcaagaactgaggtttgggaacctccacccagatttcagaagatgtatggaaacacctggataaccaggcaaaagtttgctgcaggggtagagccctcatggagaacttctgctatggcagtgcggaagggaaatgtgagattgaagcccccacacagagtccatactggggcaccatctagtggagctgtgagaagagggccaccatcctccagaccctagaatggtacatctgccaacaccttgtaccatgtgcctggaaaagccacaggcactcaatgctagcccatgaaagcagccaagagggaggctgtaccctgcaaagccacaggggcagagctgcccaagactatgggaacccacctcttgcatcaggatgacctggatgcaagacatggagtcaaatatcattttggaactttaatatttgactgccttgttggatttcagatttgcatggggcctatagcccctttgttttggctaatttctcccatttggaatggctgtatttaccaaatgcctgtactaccatggtatctaggaagtaactgacttgcttttaattttacaggctcatagggagaagggagttgtattgtctcaggtgagacattgggctgtggacttttgagttaatactgagataagactttgggggactgttgggaaggcatgatgggttttgaaatgtgaggacatgagatttgggaggggccagggaagaatgatatggtttggctgtgcccccacccaaatctcaacttgaattgtatctcccaaaattcccacaagttgtgggagagacccagtggggggtaactgaatcatggaggcgggtccttcctgtgctattcctgtgatagcaaatctgtctcatgagatctgatgggtttatctgggttttccacttttgcttcctcctcattctgtcttgctgctgccatgaaagaagtgcctcttgccctctgccatgattgtgaggtcttccccagccatgtagaactgtaagtccagttaaaattatttcttttgccaattgcccagtcttgggtatgtgtttatcagcagtgtgaaaacagactgatgcacaggctttttgtttgtttgtttgttccaaatgaattttagaatagatttctctggttctgggagttgttggtattttggtaggaatatcattaaatatataaattgctttgggcagtatggccattaataactctattaatacttccaatccatgagcatggaatatttttccatttatttatgtcatctctggtttctttcagcaatgtattgtagttctgcttgaagagactttttacctccttagtaagatagactcctaggtatttcatttcgtttgtggttattataaatgagattgtgtctttgctttgattctcatctagaatgttactggtgtatagaaattctactgctttctatagctgatcttgtatcctaaaactttaccaaatttgtttattagttccaggagcctttgggtggtatctttggagttttctaggtatagaatcatattgtcagcaaagagagatagattaacttgttattctcctagttggatgccttttatttctttttcttccctgattgccctgggtaggccttccagtactgtgttgaataggagtagtaagagtagacatccttgccttgttccagttctcaaggggaatggttcagtttttgctggttcagtgtgatgctggctgtgcgcttgtcatagatggctcttattattttgaggtatgtttcttcaatgcctaattgatttaggatttttatcatgaagaatgattgattttatctaagactttttttttccatctattgaggtaatcatatggtgtttgtctttgattctgtttatgtggtgaatcacatttattgatttgcatgtgttgaaccaaccttgtattcctgaaacaaagcctacttgaccactgtgaattaaccttttcatgtgcttctggattcagtttgtcgagtacctatgttcatcagggatattggcctgaattttcttttttcattgtgtctctgccatgttttgctatcagaatgatgctggctttacagaatgaattagggagaaacccctccctatcaactttttggaatagtttcactgtgattggtatcagttcttctttgtacatctggtagaattttactgtaaatccatctagtttagggctccttttggttggtaagatttttattactgactcaatttccgaacttgttacgggtcttttcaggttttcacttgctttctgattcaatcttgggaagttgtgtgtttctaggaatttacccattttctctagatttttaaatttttatgcgtggaggtgttcataaataatccccgaggatatttcgtatttgcatggaattggttgtaatgttgtctttgtcatttctgattgcacttatttggatctttttttcatcttcttaattgttaattcagctaacagctgttaaatcagctaacagtccatcaaacttgtttattcttttaaatttttagttttactgatcatttgtgtggacttttgagtctcagtttcttttagttgttctctgatattagttatttcttttctactagctttgaagctggaatgttgtattttttttctttagtttctccagttatgcttttaagtagttaatttgagaactttctaacctcttgataaaggtgtttagcacataaactttccttttaacattgttttagctgcatcccaaatgttttggtaaggtgtgtctctatattcattaatttcaaatgattttttactttatcttaatttcattgattaccccaaagttattcagaagcaagttgtttaattttcatgttttgtgtagttttgagagattttcttattattgatttctatttttattgcactgtgttccaagagcacacttggtatgcattcaactttttaaaatgtattgagacttgctttatgtctgagcatatggcaggtcttagaatatattctgtgtatggatgacaaaaatatatattccatacttgttgggtgaagtactctctagatgtctattaggtccaattggtcaagtgttgagtttaagtccagaatttgttttagtttcctgcctcaataatctgtctaatgctgttagtgtggtgtcaaagtcccccactattattgtgtggctaagtttttttataagtcaagaagaccttgttttatgactctgtttgctcctatgttgagcataaacatatatgtttaagatgttaaaccttcttattgaaatgaaccctttatcattatgtacagccattgtttcttctttctgattattgttggtttaaaatctattttatatggtataagaataatgctcctttttgttttctctttgcttggtagattattctccgttcctttactttgagcctgtggtgtcattacatgtgagatgcatctcatgaaaagagtagactgttggatcttgtcttttttatctagtttgccactctgtgtcttttaagtggggtgcttagattacattcagggttagtattgatatacaagattttgatcctgtcatcatgttgttagctaacttggttttgtagacttgatggtgtagtttctttttattgttggtgggctttgtgcttgagagtatttttgaggtaggttttggtcttttgtttccatgttaatgctcctttcaggacctcttgtaagagtggtctgttaataacatatcccttagtgcttgcttctctgagaaggatttttatttctctttctcttatgaagattagtttggtgaggtatgatagtcttggttgaaattcttttctttaagaatgctgtaaagaggctcccaccatcctctggcttgtagggtttctgctgagagatctgctgctagcccgatggggcattctttataggtgacctacctttctctctagctgccttgaagattttttcttttgccttgactttgatgaatttgatgactatgtgccttgggggtggtcattttttgtagtatctttcaggagttctctatattttttgaatttgtatgttctcctctctagcaacttcagggaaatttttatgaacgatatcttcaatatggtttccaaattacttactccttctctttcaggaatgcccatgagttgtagatttaacttttttacataatcctatatttattgaaagttttgttcattttgtaaaattcttttttccttatatttgtatgagagagcttatttgaagagccagtctttaagctctgagattctttcttcagcttgatctattctgctattgatacttccaattgtgttgtggaattcttgaagtaaatttttcagctccagaagttcaggttggttctttcttcaaatggctatttcatctttcagctcctggattgttttactggattccttggattgggtttcaactttctccttgatcccattgagcttccttaccatccagattctaaattctatgtccatcacttcagtcatctcaatctagctaattatcatttctgaggggctagagtgtctgtttgcaggtaagggggcacgctggcttatggagtttccagaattcttgcattgattctttctcatgtggaagggctgacattcttctaactatgatgtggattgagtatactcagttggctttatttctgggtgttttcagagggtcagcactctgtacaaagtgtttatttgtggctggacctttgccttagttttcccaggcactgtatactggcaaaatattttagtgttgtattttgggcttcaatccagtaggtggtgcataacgttagctggcagataggctcttactctgctgcatggctcttgtgttttaatgcagttggtagtagtgctctgtggtgggtggggagagagatggccccctcacctggtctgctcctgggccttggagttgccccttctgaccgctgactccatgcccatatttcttttgttaggtgctctaatccacagtgctcccccaggcagaggccacggttgacagactggccatatccttgacaggcctgccctgcagaaggaggcacacaccactcctccataggcccatgaacccaagcatctcacttctatcagtgatccgagagtaagggcttgccactgcttagacactgtgcaagtcagcaagttccattcagctaggtgctacaggggtgggtgggctcatctaatctgctgtccggatgcttcacaaggaaacatggggttgcacctgcctgatgagttcagacagaagcaggacagctgggctggaagctctagcaggtgtgacccacctggctatcagtgacagggatgggtcgagtcaccttccctgctgtctggatgttttctggggcaacaggacgctaccccactggctgagtttaggcataagcaggacttcttggctggaagctctagcaggtgtggcctgcctggctctgaggagcagagataggtggagttgaccaatctgccatccacatatttcccagggaaacaggaggatacagccaccagatggattcaggcagaaacagaaatactggagtggaatcactaccaggtgtggcctgcctgcttatgagaaatggggttttaccctgttgtccagtctggggtataatggtgcaatcataactccctgtaccctcaaactcctaggctcaagcaatcttccccgctcagcctcctgtgtacctaaggactacaggcatgtgccaccatgtttgactattctttttaatgttttttagagacaggtctcactatattgcccaggctggtctcaaatccttgtctcaagcaatcctcctgcctcagcctcccaaggtgctgggattacacacatgaaccactgcacctttaagtcataatcattttgctggtggagggtcttgcttcaatgtcgatggctgctgattgatcaggctatttcttaatgtatgcctataatgaagattgccacatatatttgattctttcttctacaaaagatttctctctagcattcaatgctgtctgatagcctttcactcactatagaacttgcaaaattggagtcagctctcccaaaccctgacactattttatcaagtaagtttatgtaatattctaaatcttctgttgtcatttcaacaatgttcacagcatcttcaattgatgctgttgtagattcaaatgcagtaaaccactttctttgcttatccataagaagaaagccctcatcagttcaggttttcttatgagattgcaataattcaatcacatcttcaggctccatttttaattatagttcccttgctatttccagcaaatcttcagcttcttccactactgaaatattgaactcctcaaggtcatccttgagggttggaatcaacttctttcaaattcctatgaatgttggtattttgacattggagcatgactgaaaaattgtcttaatggcatctaaaatggtgaatattttccagtagactttcaatttagtttgcctagatccatcagagaaatcactatctatggcagctacagccttatgaaatgtattttttaaatagtcagacctgaaagtcaaaattaactcttgatccatggactgcagaatggatgttgtgttagaagccatgaagccaacattaatcatcttgtacatctcttgggtgagttcttgggcaaccaggtgcattatctatatacagtaatattttgaaaggaatctttattctgagtagaaggcctcaatggtggtcttaaaatatttagtaaaccatgttgcaaacagatatactgtcattcaggctttgttcattcatttataaagcacaggcagaatagattgagcacaattcttaagggtcctaggatttttgaaatggtgagtgagcattgccttcaactcaaattcactagctgcattagcccttaacaaattagtcagcttgtccttgaaagctttaaaactgaacattgacttctctctagctgtgagaagtcctagatggcagcttcttctaatataaaactgtttcattgtctacattgaaaacctcttgcttagtttcaatattttcttcaaagatcttagcttgatcttctggataaattacagacacttctacatcagtacttgttgctttaccttgtacttttttgttatgaagatggctttactccttaaacattatgtaccaacctctgctagcttgaaactttccttctgcagcttcctttcctctctcagccattgtaagattgaagagagttaggtcttttctctggattagactttggtttacgggaatgttgtggcttgtttgatcttctatccagaccactaaaactttctccatatcaacaataagactgtttcactttttttaccatttgttcgttcactggagtagcacatttaatttcctttgtgaacttttccttcgcattcacaacgtggctagctgtttggtgcaagagccctagctttcagcctatcttggctttcaccttgcattcctcactatgcttaatcatttttagcttttgatttaaagtgagaaatctgtgactcttcctttcatctgaaaacttataggtcactgtagggctattaattggcctaatttcaatattgttgtgtcttagagaatagggaggccaaaggggagagagagagatgggggaacagctcatccatagagcagtcggaacacacacaacatttatcaattaagttcaccatcttacatggctgtgattcatggctgtgattcactgtaacctcaaccaaaacaattacattggtaacatgaaagactattgatcacagatcaccataacagatataaaaataatgaaaaagtttgaaatataatatgaattaccaaaatgtgacagagagataagaaatgagcgcatgctcttgggaaaaaatggcaccaatagacttgcttgattcaggattgccataagcattcaatttgtattaaaaaaagtgaagtacaatagtgcagtaaattaaggtgcaatgaaatgagatatgcctgtattaatttttccagttattgctaatgtagaattttgaggagaaaatatatatgaagggattgaaatagataagcataagaaagaatgtctatgatgtaatgatttgacttaccattaatgtagtgttttaagattatgttgttctttcacagccattatcatattgggtctttacaaaaccactgtgacttaggcagggtaggtatttctgtccccacattacagatgagaggcatcctttgcaatatatttttcactatgtacactgctaatggtcaaataatgtgggtagaattaagataaggcctaaggcaaaatacaagaataaaagtgctttttaaaaataaatttttatttttattttaagttccagggtacatgtacaggatgtgcaggtttgttacataggtaaacatgtgctatggtggtttgctgcacctatcaacccatcacccaggtattaagcccagtgtgcattagctattattttaatgctttccttcctccaacctcatcccccaatatgacccagagctcatatagccaagacaattctaagcaaaaacaagaaagctggaggcatcatgctaccagacttcagactctactatgaggctaaaatagacaaaacagcatggtactggtacagaaaccgacacatagaccaatggaacagaacagagatctcagaaataagaccacacatctacaaccatctgatcttctacaaacctgacaaaaacaagcagtagggaaaagatttcgtatttaataaatggtactgggagaactggctagccatgtgcataaaatagaactggccctctttcttacatcttatacaaaaattaacttaagatggatcatgccactgcactccagcctgggtgacagagaaagactccagctcaaaaaacaacaacaaaaaaaattaactcaagatgggttaaagacttaagtgtaaaacccaaacgtataaaacaccctagaagaaaatctaggcaatatcattcaggacataggcacaggcaaagatttcatgacaaaattgccaaaagcaattgcaacaaaagcaaaaattgacaaacgggatctaattaaactaaagagttctgcacagcaaaagaaactatcattgtcatgaacaggcaacctatagaatgtgagaaaatttttgcaatctatccatctgacaaagggctaatatccggaatatacgaggaacgtaaaagtgctttttaatgtttagggcgaaagaaagaaggaagattagtttgttaattggggcagtagaggaatacatttaggccagttttctttttctttctttttttttttttgagatggagtttcactcttattgcccaggctggagtgcaacctcagcctcccgggttcaagcaattctgctgcctcaaccttctgagtagctgggattacaggcatgtgccaccatactcagctaattttgtatttttagtagagacggggtttctccatgttggtcagacaggtctcgaactcccagcctcaagtgacccacccacctcagcctcctaaagtgctgggattacaggcatgagccaccatgcttggcacagttttctttttttttttttaaacttttaatttctggggtacatgtgcagatgtttctataggtaaactgtgtgtcatggaggcttggtatacagattgcttcatcattcaggtagtaagcatagtacctgacaggtagttttttgatccttaccttcctcccaccctctatcctcaaggtaagtcccagtgtctgttcttcccttctttgcgttcatgtgtactcaatatttagctcccacttataagtgagaacatgaggtatttagttttctattcctgtgtttgcttaggataatgacctccagctccatccatgttgctgtaaaggacatgatctctgagtttttattttgttaatctactgtcaattgattgttggatcaaaggaatgatcataattctataaatatgtgataaaatctcatttatcctagtggtcaagacagagacatgaggtacagacaataagtaaataaggtagcttggtaactggctggaagatgatacccaaggagtgtcagttaatggagtgaggtttaggggcaatgaggtttctgggggattgccacagagaacagttctgagtctggggaaatgtaaaataacccagaatacacttagcaatacaagaagatgacactgtgggcctttacattttgggatcccctatactttatttctcccctggtcatcttctttggggaccctgcctctgctgtccacctccttccagtttaaccatccatcttgaggccctgctgattttcctattctttaattttctgggcttcactcaacatattccctttttggtaaggaatttttcacagatggccaacttggtaataaacctattccacattctcaataggattttaaaagtttcacacactgtaaactaatctcatagaaaactcaaattgatccattgtattcattatttatcataatagttaccattattgggtactaactaaatagcaggatttatgttcagctttttataaacaagtgcatttttttcacaatagtcctgaaacaaatactaataaacctcatatggcaattgaagaaataaaagtagtgatgaaaatgatatcacagtggcaaagtgagaatgacataacactaaagagattatgattaagcttgaaaacagagtgaggaatccaaagatactgcaacagttaattcactaggcagaatgctgtcaaattggagtgaattcctgagagaagcattaagtcagtaaaaagatctgaaaaacaattgatgagacaaaattttaggagctgagaatagtgaacctggaggattttggaaaaaaaataggtgtctatttttgcttaattaatgggttgtcatatgaagggaagaatttcatttattcactgtattccagaatatggtccaagaattggaagttttaaggaagtagattttaatcaaatatttaaaaagtttctatccaattgaattgtctgaagatggaatattctgcttcatcagttcatgttctttgtaactaaaggtgtagaaaagatgatggcttatctggaatttgcagagcagatttttacatagggtggagaattaaattagttcattgttttccaaagtgcagggttaggagactaacacctataaaaacagcatcgaatcacatttgggtattttcttttcttttcttttcttttcttttctttttttttgagacagagtcttgctcagtcacccaggctggagtgcagtggcgcgatctccgctcactgcaagctccacctcctgggttcacgccattctcctgcctcagcctccctagtagctgggattacaggcccccgccaccactcctggctaattttttgtattttttagtagagacggggtttcactgtgttagccaggatggtctcgatctcctgacctcatgatccacccgcctcggcctcccaaagtgctgggattataggcttgagccaccgcgcctggcacatttgggtaatttcttttaacattttctcctatccttcttattctagtctagaataaaaacatctgattggtactagcatatctcaagtatacctattttatatttatttgagattgtttcatttttcaattctcaaaatactaatttttttgtttgttgcatctaataactcttcttcatggaggtgatttggggaaacctaattcgaattttatgtctaaagtgggggccgtcttgtggagactattccttctaactttgcggtttgtgtaactccacatactctctggaaataaattgccaatattctgacacttctctcaacactttagcactcatctcttgcaaacaagtcattcttctccacaactacaataataaaataacatcacctaacataaaacctatattcaaatttcctccattccacgaaggtattggagagctattagaattcatttttaatatgttaatattaggccaagcgtggtggctcacgcctataatctcagcaccgtgggaggagaatatgggagaactgcttgagcccagaagtttgagacaatcctaggcaacatagggagactccatctctacaaaaagtaaaagcatcagccaggcatgatggtgtgcacccgtggcctcagctactctggagactgaggcaggaggattcgttgaggggggagtatgaggctgcaatgagctatgataacatcactgtactccagtctgagcaacaaagtaagatcctgtctcgaaatatatatatatatatatatatatacacacacacacacacacacacacacacacacacacgttaatattcatgataaaacagacgcaaagaaatattattatgccttctttcttattgtctaccttacccaaaaagaactgtcagagaagagaacagagatctaaaattattgggttggagcacagttataaagaggaaaactttttaaagctaaatccagtcagggaagctgactgtaggtgggctaggggtgaaagaggaagaggtgtacattaaggcagaggaaattgtagttaagggaactatcccatcatggttaaagcttttcagtcagagttgtctcaacttgtaaaaaaagtacttctttctaaacagtatgttttactatagagggcatagtgtgcagtagttactatagatttgttgttgcagtattacagagagacactaatattctctgaagggaggggtcacaggatctgaatgtttcctcctttcgcccctgtcctgtttcaaactcttgctccttatttattcatttttagcaacgaagcttgttaagccccttccacgtaccaggtatttgccaggcattaggattgtggtggtgaaaacacaaatacgtttcctgaaacataaagcgtggaaaaatactgaataactaattctaaccataatgcattgtttgaaggagaagtgcagagcactacaggtgcttttaactggaatcttactgaggatcaggaaaagtcttcctatggaagtcccctttaagctgaacccaaaagttaagattaaccgagggaagggagaaggggtaaggaataggaaaagggaatagggaacagaatgggagcaaaagaaaggaggcaggagagaacctttccatgtgggagtgcacatttttgcaacaggaaatttgttttgtctctgatagttccgtgttccacttgccaaggtatagcagctgcttatacctttcctttctgttatttttcagaaagcagggtctgagcatgtggcaagagggtgatgttaaccctggcaccctctgaggcactaatttcactgctgttttatgccctctcctagctcatccatttctctccctgcccttccttatgttggggaattactcacctactctgggcctcatcttctttgtggactttggagaccgttctgcttttatattgtctgtaggtgaattgtttccatgtaagttacatattttctcatttgatctcttcctcaaaactatcacccagaactccacctgcaatttaataccacctcttctggtctctctccgtctcattgctgctgtgtggacaaaggtttcatgtgtacattatagacaaatgtttggtgcagcatttgatccaacactgtgctcttcccttgaatgctaatcatgtacacacagacaaataatttacttggcttttattgtgtttttgtttttattatgttttctggctcttgttttgtttggcgagttttgttgaacacaggcactaagtttgtgtaaattcatgctgaggatgtttgtgcagctacccacagaagctatggggaggaaaggaagtcctagcatagtaaacatgtagaaagacaggcatgggcattcacagggttcatgcaaacccatcacttttgatagactggagacacaacatgtaagctccatgatagcagcgatttcactgactttgttcactgctgtctcttgcagctatagcagagctcattatgttgttcttttttaatacatatttgttgaataaatgtatgaaaacctagcaatatagcatttagagatagttatctgtaaagaaatcaggcagtgcacagtggctcacacctgtaatcccagcactttgggaggctgaggcgggtggatcacctgaggccaagagtttgagaccagcctgaccaacatggtgaaatcccatctttactaaaaatacaaaaattagttgggcttggtggcatgtgcctataatcccagctactacggaggctgaggcaggagaatcgcttgaactcgggaggcggagtttgcagtgagctgaaatcacaccattacactccagcctggacaacaagagtgaaactccatctcaagaaaaaaaaaaaaaggaaagaaatcagtgtgcaaattacataggatttctttccttaaagaaatgcatcaaggccggatgcagtggctcacgcctataatctcagcactttaggaggcagaggcgggcagatcacctgaggtccagtgttcaggagcagcctggccaacatgcgaaatgccttctctacaagaaatacaaaaattagccaggcatgatggtgcaagcttgtaatcccagctactcagaaggctgaggcacaataatcatttgaacctgggaggcagaggttgcagtcagctgagatcgtgccactgcactctagcttaggtgacagagctagactccatctccaaaaataaaggaatgaataagataccagcatatactactttctttttgcaatgagtctgtgagctctgcaccttcccaaggatgggcctggacccagaccctcccaggaagctctactctaggaatcatgcaaggactcactttagctttggtatggtgcatttcagtccgattaaaattgttttcatctctggaaataaaattgtggcttacatatcctttcagtcccactgatttacatcactgagaggatcatgaaaataaccatggattggacttatattctaagagatattttagtgctggaaagatgctcctgcattgtctggtcccagccccaaatgtctttcctaatgttttgagcttcaggtgcaaaccctggtcttgagaccctgtccctgtatcttctctccacagtcagggatgacagggacctcatcccaaaacccaggactcagtcagggaaagcctcaaggcattttatagctcagagaggccaccaaacccagcctgcttcttcattctggtgttcagattcgaatccaggctgtctcttagcatccatcattatgctgaatactttgattattgctttatggagataagtgattttctctaaactttaatttctctggaagtggagtctgattttgtggaaagagctcaagattgggaaatatgaatctagggtcctaatcccagctttgtacttcttgaataagtcttttaccattgctgggtctcattttctacacttacttgagggtatggacaagacggtctctcaaatttcttccagcctttatgacctatagttctatctggacactaggaaggtccagaccagggtacaccacttcattttttattgctacaaaatggttttttatcctgttagtattgcttaattttcctcctgtcctgagtccctttcattttctgtattttgcagctgagattctatgccacgcattttctgtatatgataggtttaggttgttttcccaccacctgcgaaactgtcatgcaagtccacaggaattagctgtcagtatctttctttcctttattaacacttctagctccaggagtgggacctagaggtctttttgttcaaggacaggaatgaaaagggcaaaaggaatgagacatagggaagacccaataaacatcaaagttatggtttcaggtgataattgtggttcaggcaggtttacatatcagcattctgttggtttgattttataaaattaaggacccacactaagtgtgatgatgaatagcacttctcttccttgaatagtgaggaaagaaataacaattgagcccatgagcttgaaagagaaggaagtttttatgatttctttggcaacatacttgctaatttctgactattcaagctctatctgaggtagaagtagaggatgtacaataactgaacatctgaaagaagagagagaagagtccatagttggacgtcttaatttacagcatcctggagacctgaaagctagggctcatggcctttggtttgcatcatgaatcactcacaggatagagtattcagtaaaccctgagtgctgttgcagaaaccggcaggcgtggcatagatgtagcatggcatgctcagtatcttgtattaggcagagacagcttttaggaaccacttgtggatgtgggaggaattgtagacaaggagtcgtaagaccccagtgtgatctcccactgacttaccctggaaaaattcacacaactcacttcatatcgctagtttctcccccagcccaacatgcattgtggaattcttttccttacttttaactgttaatttgaataattttagaattacataagagttgttagcctcatgggattttgcaagtatcaaatgaaataaacatgagaaaatattttgaagagcttgaaagtaccacatttaagttgctgtcgaggcagctcttgtcccactataatgatgtgaataccttcatcagggcacttattttggagcattgcaattagttatttacatgttttctcctttactaatgaaacaggtctgtgtcctgattatttttttgtctgcaattctagcataatacttgtcaaatagtagttaatcttgaaaaagattaagaagaggagaggactctagaaatacaacctatgactaaccaataatgtcagttattatcaatagcaacatttttatggcaaagacattgcagatgtgattaagctaagactcttgagatagggagattattctggatttgccaggtgggcccaaaggtgaagtaaatttgagcatagaagaaggtgacttgacagaagcagaaagtgatctgaagatgccatgttgatggcctcaaagatgaaggaagaaggcaagagcaaaggaatgcagttctagaagctgaaaagatcaagaaaatgaattcttctctggagcctctagaaggagcacggccatgtctacacctggacttcatcccaagtgaaagtaatttcatagttctggcttccagaactatgaaaaaatatatttgtgttgttttaagcctccaaatttgtaataatttgttacagcagctataggaaattcacacagggcagcctacaggagtttgtcagagcctgtatttatttccgaccagtggggcattggaaaatctgtctcagaaatactgtctcagagccttgcttttaccatttgtaatttataattatgaattgactcatagtgtttctgagaccttcaaggcaatgtcttgaccggtgctattcattggtaacataatgcaggccagaaatgtgagccacacatgttattttaaaattttagtagccatccatgttaaaaacaaaagtaaaaagaaacaggtaaaattatttttaataatattttaatttaacctaatatatcaaaaaagtataatttctatatataatataaaaattattaatgagttttttaatataattttttcctaggtctttaaaatttggtatgtctttttatttaaagtacatctcaatttagaccagccacatttccagtgctggatggtcacatgtatccaggggctaccatattgaggagtgcaggcctagaagaggtttggtagtggtcctgccccgtagtctgtgcttaataaataaatgccatatcatctgcatctcctgactggccttgccagtcttcactagcctggaccttggcagccctatgtgagtcaaggtgtgcatcaggcctgggcttccttttgtcccccatcaaccctggcaatgatacatagcactggattgactcatgtagctttgtaccaagcaggaaagcttctttctgctttgcaggaatacagcaaggctgtatgtgtatgaatgagacacttaaccccaggcttttcccttcccttcccttttaaatgttttcgtctttcagttatttcagcaccctatctacagttcccaaatcagtttttcaacacagagttacttagcatgccttgggctagagccaccacagggaaccaattaactctctgctctaatgtggacctgttaatttcacaggctttggagtcagacagtcctaatttgaagtcccatctcttctaattagctgtgaatccttggaaaagttacctaaatattccaggattcagcttctatatctgtaaaatggcaataataatatatagtggacaggattaaatagacacaatgcatgaaaactcctgacacatagctaatttatgcctaataaatgttagctatcatcatattttttcatcaataaatccagtgtttcattcttctattcttaatattagtatcagtcgctatcatctctaccatttcccccacatactatctaatagcacttaaaagggttgtcccttgagctgggcttagttatttggagttagttctcattggagccaggagtgacctcagaatgtatcacatcacctggacgttaatcaaattatatactctaatgactgagtcttataactcaaatcttcagaaagattaccaactttccctgggcttttctttggagcttccaaaatgcaatgggaactcctgaatgtatcctaagccttcctcaatccttagccgttaggtccaccaatgctcctaactgtgctgtttgaccctaaaccaattattaactcaagcctacttgaggcagtgagttggagtatttgtttgtagactttggaattacatagtctttgcatccctttttaacctgattttactctctttttatttattccatacagagaattagaccttcttcttgcatagtttccaacagctttcccacttagatgtttagtcccctctttagattaggagctcacattcaccttctcctaatagtatgggtccctgctaccccactaacttttgccattactttgtttttaaaattggtgctttttccccatcctgggtcttctgataagaaattaacactttgaactgcatctgcctgactcctgagtttttgtatcagctacatttgctactgctgtgttccataatcaacaaggctaatgatgaaaattcctcctgagcatgctacatcccattgactgcactggtatcagccttgatggttagaaaagctgcctagtactgccacacactgcccaggattgtctgttttagcctctatgtcaccctttgcaatgaagattaggtatgcttccaccctgagcccttgtaagtcatttagtagggaattatggcctgtttgtagcctatttaggcatttctattgttcaacaagacttaggtctacagaaaccctcaaaaagcaagccttttcctaagatctgtctctatgttgggctccagcatattcacagtgaggatcctgtatgcacacttgcctgggaagccacttggtcccttgcagactcataactatactgctccacctctgtaattactgggtttacttggaaagggttgtatcagctgaggtgccaggatcagaaataatataaatattttaagtttttatgcagagagtcctagactcagaggtaggaggcttcagttctagccacaactccctttacccttgagcgagacaggtagcttttctggatttgcgtaagaatggccctatctcaaagccctgttgaggagtctctgggatatctgctacatatctggtttatgaattttattcttcctgctaggcctgtggactcacattttggcactctttagacaatattcagctcacagccatattttatttggtatgcactgtgttttgctttgtattacatttgaatgccttatttaggtctgcctctctgcatcctcatggtttcttctgctctgttttctctctcacttggctcaactcaccctcgcttggtcccaaagacatttgaatttttggcttcaggtccaatgtgtgtagacgttgctcctctgggtttacgaaaataaaaataactaccccaggctcattttctaaatgcaaacgagtttatttgggaaaaaaatgatttactctgagatcaaagtactatgtctccgtagtaatggttaaaatctggcacttcctacaggttctgtttgatgccatctgttttatcatgaacaaaccacagtacagttcagttcagctcagctctgctcctctgaaatgccaccaaggccccagatgcccatttttgggatgtggtcagcaagaggagtgttgagattttacctcattgcattgtacctgcgcttccgaagcaggctgcagccacttccagtttatgctctgttactgatccatgattcaaaaaaccctgctgtttctgctgcagggtctccctacttgcctggagctgtggaatgcaccatgaaccaggaacagcatggggcagagccctcagaggaccacagctattgtgattgtcagcctctaagaggaccctactcatcctcacctcctggtactgacacccatgtgtgaacctttccctttaagtatgggctggattcagtaactcacttctaaccaatagtgtacagcagagtgatggaatgtcacttccaagattaggttataaaagaacatagggacctcttttgctttctctctcatttggagtcctcactctcggggaagccagccgtcatgttgtgatcaatcttattcagaggcccacatggtaaagaaccgatgaagacctgaggtctgcctatagtcctaccaacaaccacatgagtcagctttgaactgggtcctccccaacttgggcctggacatgactgcagccctggctgacaccctggtggcagtctgtaagagacactgagccagtggacccacctaagccatgacctgctttctgatccacagaaataaaatttgttgtttgagactattgagtttgaggataatttgttatacagcaatatatactaaaccgccactgattgcggcgtacaccagaaatatggaaaatatgatggaagtggtctggggcaggaataatacacagtctcagctctcagttggtcagctgtcagaggccagagaatagatatcaagaattcaacacagatcaaacacaccagaaaggggctctgcacaggtggagatcagatctttacattcttctctacccagactgaccctttacaccttatctttatgcctgaaatgcattcagcttatcagctctgcaagaatatagaggtaaaaatgggaacatcttgagggataaagagtgtgtttacaaaaaagactgcttgacttctgatcaagtttgaaacagtccctcaagttaaaagagcatgtttggaagagatttttttttttcatacagtaggtatagtttctctgtaataaaatatttcatttattttgttaatttgtttaataattttatgcttggatctttttcccattcagagattggtaaaatcttcacctctggttttgtggtttttctatatggttttaacttttaatattaaaattgttgatataactagaattatttttaatgtacaatgtataggtataacttgatttaggtataacttgatttttcccttcacttagccaatttcccaggaccatttcctgagtaattcgagcttcatttgtaagtttttttaatcatacacagtcatataggtttatattcatctaaggtgggctatgcctttttttttatgcatagaaactggctgtagattcctgagccagcagcactctatttctattacactaatgttgtgataagtttgtaatgcattttataattggtatatcaacatgcccccccattactcccatttttgaaagctgtcttgcttattatcaactgtttttttttttagtggactttaatttggttgagagctggcagtgaaatccacttcactgtgatggaaaacccatgcttttaatcactatataggcttaataccaattcctagttctcttctctcagcatttaataaagagaaagtaagggtggagcatgttaacattagggtaatacatgttataaagcctttccttagtgccactgtcatggaagcatattctcatttgcttattctggagacccaggttctgggagtgtggcttaggacagcctaacttctctgtctcaatttctcaatctgtgaacaaaggtggctagtcagatgaattgtaaggttcctcataggcctgatatatgctctaattccatatacccataaatagaagacagggagatgggatgcttctgctcctgggcttggactggtcaaagagggtgagttatctctgtgcagtgttggaatatttgctgaagttaatgagaaatgagctctgaatacattgaaaaacacacaggatttttatgtatttgtgcaaattctactaattagcatggacaaacaagaaatagatgtgcagggaaaggctactgtttgttttctctcactggtgcatgttaatgatcaaaataagatttgcaaatcagcctgcatctatcttccagggttaatattacaatttggtgagctttcaaacagcttgacttatattactgttctggtaggctgccaggaaccccaaatcggttcagcagtgtctagtgatttcaggcctgataatggacattggttgcccaaggggcttattctggtggagggaaacagagggacagcaaggaaggaaccatctttcctttatgccgcagaacttaacttcatttatattcatttgtccaaactgttttaaggcaagagtgatgtctgcctttattgataagataattgacatttctgatcattttgctacttgttttactgggaataaaagaagagcatgtgtatttgtcggtgatagagtttatgactggagccaacagagtgtgttagctgtcatcagtgcctgaatggcttggctgtcctgtaagaaaaacagtacatgtatagtttgtggctcctttgggagaatgactgggaccaagatacagaagttttggaagacagctcatagattatctcaaagaggaactttctaataattagagttggcctcagatggaaccgtctcccacggactttttaagtaagatcaagcactctctggataaccacttgttgcaaatgctcaagatttatttggggatcacaatggtaccttgcaaaccaggaactattggatcctattaccctctgtagggcagaaagtaaattgtactgggactaattctattacttatatttcagtttcccagatcaaagtggaatgtctgcaaaataaatattggcagtgatatggtttggacctgtgtccctcccaaatctcatgtcaagttgtaatatccagtgttggaggtggggctggtgggaagagattgggccatgggtgtggagttcccatgaatggtttagcaccatcctttcctggtactgtgtagtcagttctcatgagacctggttgtttaaaagtgtgtagcacctccctctacactctctttcttccacctgttccagccatgtgaagggctggctcctgcttcgccttctgccatgagtaaaatctccccgaggcttccccagaagcagatgcagccttgcttcctatatagcctgcagaactgtgagtcgattaaacctcttttctttataaattacccagtctcaggtatttctttatagcaatgcaagaatggactaatacaggcagtgaaaagactagtaagcaagcccatgaattagcaacttatagccccagaaaaataatgctgtaatttacttactaaagttttaatcaaaataggacttaaaataaaatgaaagtaaatgacaacattgtttatctggattaaataagatatcctacctttattaaagtgcctagcgcccacaaataggaaggaaatcctttgaagtttcacatttactagaaagagttaccagcctagtagagtaggggcaaggatgatgcattagagcactgcctccaaaacagtagtccatggtttagctgaagcagaatcaccctggtggatcttaaggccttaccagaacctgagagagggtattggaaaatgcattagaaataaacttcccaagtgatttaatgtgtaaccggtttgggaaatctctgtattatatggcctcaaattttcctcaagctcttaagatcccaggtaattttaagtagaattatatgtattttctataagttgcattttactgcaggatcccagttaatatgttatttcctgtaatcaatgaataagattcagctaagcatcatcatctatcaaaaccatgattcttgtttatgactttgctaattattctttccaaccatggaaagttgccatatttcagaacagagtgaatgtttgttcagattccaattcagagctcccaaatttactaagtagaaggtaaattatacatggtacattactggtactttgcatgatgaaaataagacatcagctctcaatctttcgaatagagagcaaaagtgaaacaaataagacaagtacagcatggcagagttacaactgaggcatgtgtatattgggtaatggcacaaagaaaggatagtatcgtagctggagaggtggtcgtggaagaatcaggggattgaggtataaaagactggaacatagcaaaagaagagtggtggaaaggctaaatggcagagggagttccagaaggaagctggaatagcttggtgcattcaggactcatacagtagcctaactcttgtaatattgtatgcataagtttatttaaattcaccttgtgtagcttaaaatcagacatacataaatatgggatttgacaattgataacgttcacataattaaatgaggaaagtttcttagctttattccacattctactaagggtttgggacctaacgctcctcaaagtcaagagcaaattaattttccagacaagtgtgttgtatcagctgagaagaaaggctctggagacaagccactaagcctgccattctggtaccttaaactctgttcatcagagtatcataagctgtaaaatgaagataaaactcacaattatctcatggagttattatgaagattaaataaataaatacatggcaagagtgaaaacaagccaactaccacgtcagctcttagtactattattagttggtgctgtgaagggaagacaaaggagatgaattgggagaggaaggtccttgtcactcacctccaaatgtctgggagccaaagatgctggggaagaaacacacagatcatcaattccctgagactctttccagccacctcaccccgacaactccaacttacaattaaggacatttctctgtgttcattgacaagccattaacaaattttaaataaagatataactcagcccctcctccagctcaggggctgtccatcatttatgtttgaatctccagtgcctgactcatagcagacagtcactaatgactatgaaatgaataaatgagagagtaaatcaaataattaaaacacagtgaagctgtgtgattacaccagattatgacaccagcatcagaggagaaaactaagaatcactatttaatttcagcagagtactatgttttgaatgcacacgttatgacccatttgatctgaaagtaatactgaaacaagtttgtattgatctcatccactacttgctcaagcatacgttcctgtccgagttactcctgggagtagaaggggcaatgtcccgtgagtcagcactctggattctgtaaatgcttcagtcactgcccagttcttcaatctgtagtaaccagtctctctaagccccagttttctcatttggaaaatgaggatcatgataataatagttaattgtttgaaagtttcaagattaaatgagataaaatgttattgcacagtggctggcacaaagagtgtgctcagaaaatgttagttgatatgatattattttatttgtaatacatcattcatatgaaaagcacacaaactacaaaaagataaacgtatttactcatggaataaggtgaggttctggatctatttcgaagtaatctgatctaggaggataagcggagatgacacaagactgaccgtaagttaaagattgtttcagccgctgatacgtggacgttcactttactctcctttttgcctttgtatatgtttgaaaatgtccatagtaaaagttaagaataatccatgtgacacacatatacacaaccaaaaatagcatgctgaagtttctggcttctaagcaacctgatgcaactagatgccactatgttctccctattccacaccaagcactgtgcccaatcaacaccagaaaacagagaactgaaacagaaaacacttaaggataacccaggtttcatttgtttgcttgcttgttggtttagttggagaaagcaggggacacacaaataatactttaatagaactctgactgtgattgttgtaagagtgataatgccctaaatgacaagcaatggcagaggaagggagaaagtaggttaaaaaaaaaaaaaacttcatagggaaagtggtacttaaataaaatattgaaaaatgagcaggatttcaaaagaagtcataggaaaaagaaaaaaaagaagaaagtggaaccataccactccaagaatacatcacagagtctatcaaaaggtaaaatgggatttaagaagattaaaagaacaagtaattgagaggaagagaaggaatatgaagggactcaaattgttctgaactgtcaccgggaggctcttgtatgatggctgttcaagtttcccagggctgccaagcaccaaaactggttggcttaaaaaaaaaaaagaagaagaaatttattgtctcatagttgtggaaagctagaaatccaaaatcaagatgtcagcaggacaatgctcccactgaaacatgaaggcaaatcccccttgccccctcctagcttccagtctttctttggcaatctttggcatcccttggtttctagatgtctaactccaatttctgcctctgtcttcacatggccatcttcttaccaggagaagagtcattctggatgaggtgcccacactactccagtattaatgcatcctaacttaacttcacctgtatagcaaccctatttccaaataagatcacatcctgagctactggggttaagacttcaatatatcatcatttgatgaggggcagggggtggataattcaacccatacaaatgccaagcagaattttttttcatggggagtagagtgaagcatgaagcaatttataaaactggtctcttgaagcaattagaatatttggattctattcttggtttggtcattttgtatccatgcgaccttgggcagttcccctcaagttatgtgaacctgctaaacagagctacctgttctatacaactggcagagctcttgaaggatgaaataaaatgatggcatgaaagcgctttgaaaatcttagagctctggacttgaatctgtaaagtactgttattactgatgcttctatctgtatgtccttcaccagacctgcacagataagactggaaatctcaatgattggagctctcttctatttgtgaaagtgttgtctctaaaatatctttgataaaatggaaaaaatgtttttcagagaaaatagattgctcactggaggatgtcaagtagtggcagaccaggaagaagtggcagactaggaagaaaaatacaggactaagctcaatgcttttgaaacaaaggccaatatttctactccaagtcctcctgtctacatggaaggggaacttgtgcacctaggcctacagggaggagggtctggaggactccatgaagccaaggccaaatcctctaccaaaaaaaaaaaaaaaaaaaaaaaaaaggcaaacgaatctgattgtaccgaatatggagcatgcagtgagtttcagtttttccaagttaaagataagtgaggcctatattttaatcttttgttgtctcaattttgccagttccaggtgtgaaacgcatgaccctaagagcttattggccgattaagagtttcccagacaacagagctatctaaactgacaagtcctaagtttaagaactggggaagagtgatcagatccctatttctacgaaatcagctatatcagggagcccagtattttatcggctatttgtacttgactgactaataattaaaactaatgaattgatccccatctggctatatgctttctgtgcttattctccctgttgcttagattcctgagcagatgagggggcatatcagcctactttacttctccaccccctcctaacacacacctacttcctcaacttccaaataacaaagactgaactgagctacaagaataaagcttaagaattacagaaaccgagtgagctaggtgcagatcccacctcaagtatgaatcaatagaaagaacccattcagaggtgaacaggaaaagaatctgagatgaatcagccaaaagtcctagtgtgggtagggccatgtgtaccttgaataaccacgaaacccactagtcactaacttccaaggcacacacagctgaggatgattttattgccaggaacgcccaggatcctgcaggagatagggtacaggacaagtttgagttgggggcccaggggtgaggtggagggcacagagcatgaaggcaaggctgtgagaaggctgtgcaggctgcctacctgcagctcttcccaccccactgattgtcagagtgaccttttaaccacagctgcagtcagggctttggtggtggactgagaaggaacatgaagaatgcacaaaagaaccaaaacactctgggaacagacttggcacacttaccaagagatggtctgggccccagcctatgcagatagataagagacaatgctatgtttaagcagctttatttggtcagtttgggtgcaagaaactattacattagggctaaatgtattttccaaaatgagaaagtaaagataggagcagatgctacctaggagtttctccacttgccaatacctctggtagatgttttcccacttagtcacttctgacttagataacattccccagaatcaacaagaaaataagggaagcccttcaccagagcctctcttccacttgaagctggccagcttgccatgggtgttgggtggaaggtgttctaagtgggactgttgttgaatctggcaaccaagaaaggcctcacccaccttgcctcattactatcagctcaaggaagtgttctcccacggtctctctcccactcaatagctccctccttgcacagaatgaagcaaatctgtgagtcttctggacatgaccacaacacatgagcatttgtaaaatcaatgggtgctgtaatcaagcaaaacaaattcttctggctctgtttgctagatatgtctccttacctcaggagcgtctgaggaaacctgggttttctgtctaccttacgttttattttcctagtcacttgggtttgctgaactgagagaagcttctgaatagaaataaagactagaagtacgatgacatttaagtcatctaagataattctagagccacagtgttgtaaaagcatttttaaacttttttttaactgaacattacattcgttatccccatagacacccagcaagtttgtcttcaggttcgcacattctgtgaaggaatttctggtgccccgggtggttagagttgaaagtgctgagttcagtttcatcatggcttacactaattagcaatactagccagaaattgaccctaagcccaatcacaggctgacctccaattctgagtcccaccacggtcacagctgggccttcatcctcactcaagattgactcttaagccaaatccaggaagaagggggcattcaaattataatggtagatattttatataggcctaattcatcctcccccgcaattccttgtaatgcctataaggacatgtcaaatgagcactggcagcactgataatgccaatctgtggagaagaattaccctaagcacatgttgatagtaggactgagaaaagtgagcagtcagctaaatattgggacccatcaatgtagatacagaagaggcaggaaaagactttaacataatctgctctatctcccaatatcagaagctaccaaagaagaagcctctcaaccatccaccactgtacagaagtagcacgtcagggcattcagagatatttactccttcccatccatactcccagtctcaccaacacttataattattcaccagaaattcaacaatagggagaaaagcaactggataatacacgttgcacaataaaaatatgagattatcaacaggctacgtggagaccctgggacacacatctcactataggaagtgagggtagtaatagctggagtgggaatcttgaagcctgcatcacatattaagatgcaaagttggtgtattcatctgctatatgaagatatcacagactgtgtggcttaaataactatttttcatagttctggaggctagaagtccaagatcaaggtgccaggaggcttggtttctggcgagacctccttcctcaccttgcagacagcaccttcccattgtgtccacacatggccttgtctttgtgcctgcacacagagagggcaaggagctctggtgtgtcttcctattcttataggacaccagatcttttggattagggccccatccttatgatctcatttaatcttaattacctccttaaaagctccatctccaaatgcagtcacatcagggattcaggcttcaacccataaatttacaagtaacacaattcagtctataacaattaacaaaaggtgaaagcagagatagggaaaggtatgaaaactgttcagctaactagtttttcacatactgcctctggtagaagacaagtgtttcaaattagtcatctatataggaatttccttacaatgaaaaaggggaggccatgagagtaggctatatccttgcctctggttcacgccttctagactcaggagcatgtctaggtctgggcatattaattctttctcctgtgtaagattagccacagagattttaacatcactcaagtggtcaaagagaaatcacactgccatttagcatcattgagcctgaataaagagaggattcttacttgaaggtggggaaaaaatacaataaaataaacaaaacatagggcccttagaaaggtactcctatatggaataatgttctaaccatgcaggggaaaggcatggttatgccatgaaaagtgtttttaaaaaccctttagaaaggatttcgttttgtcagtgaaattctagacagcactgactcaagaaaaacaagatcaataaataagttaaaattcaatttcaagttaaataatatcaataatgtggatctaaaacccaaagacagaaaaatagaaaaataagatcatttcaaatcctaaaaaatatttcatttaaataatcaagagccaaaagttattgtattattcttaaaactagaaaatatagagaaaaaaaaaactaggcttgagatttctgtgaaacttagagataatctctaattcagcggctcccaaagtatgtgtctcagatcatcaccatcaccatcacctgggatctggtttaaaatgcgaattctcaggtcatgctccagacctatagaatcagaaactttgggagtgggaccaggcaatctgggtttaacaagccctccaggtgattctgacacctactgagatttgagaaccactgctctagtagaaggtgaaacatgctgtaaactttcataatcagcaggtaaatttaatttaaacataagccacagtgcaaaaggcatttactactacattcatttactcagaaaatatttatgggttaactctcaagtccctaccaccattctaggtgctagatctacaatagtaaacacttcaggagttagagaccagcctgggtaacatagtgaaaggctatctctccaaaatctgtttattacatttttaaaaattaaaaaatagtaaacacttcagtcatagagtagtctataagatacaaggaaaattttgaacaatgaaagagcaagaatgtgtgaaaaacaggatacataaaaaagataacatctacaaacaacccaaattactatgatttgaatgtgtccctgatatggtttagatattttgtctcttccaaatctcatgtcgaaatgtgacttctggtgttggagatgaggcctagtgggaggtgtttgggtcatgggagcagatccctcatgaatggcttggtgctgtcctcacaataatgaatgagttcttgctctgaaataatgagacatcttgttgtttaaaagagtgtaacatcttccctccccaactgtcttgctccctctctggccatgtgatatttctgctcccttttgccctcagccatgatcataaacttcctgaggcccttgccagaagcagatgctggcaccacacttcctgtacagcctgcagaaccatgagccaaaataaacctcttttctttataaatcacccagcctcggatatttatttatagcaatgcaaaaacagactaataccatctcccaaagctaatatgtaagaaatttaatccctaatgcagcagtattgagaggcaggacctttaagaggcagagttctcatgaatagattaacttcattaccacaagagtgggagtattgtaaaagggagctcggctccttcttgctatctcaccatggaatgcctcccgccatgttatgaagcagcaggaagggtctccccagatgcagcccctcgatcttgaactttccagcctccagaactgtgagccaaatacatttctattggttataacttacccagtctgtggtattctattatagaaacacaaaatagaaaaatgcatataagggatctatacttttcaaaatcagaacatcaaaatgctcagattggataaaaacaagagtcaacattttgccacttaagaaagacacatgcaaatctttattattgttgaagattagccaggcaaatgtaaagaaatgtaagtgagtggaacaatgtttgtttcagagaaaatacaactcaggacgaaaataatataactggaatgaaggagggaaacataagtaccacttgtgagaggcagtgctgtccagacctggttttaaaaggcctcctagtgtgctatgtggtagggtgagagccagttgtatctaaagggctaagggtatggtaagcacaactaaattctctttctttcataccactggtagtagagatgatgctttaagccatacatgtaaagtactttaaaatacgcattttttaatagaaattatatttagcttagcaaacctacagttttaagggtattattgtttaggacatggctaatttttttataaaaagttaattttaataaatgattgagcaaataatagtacatactccatatctcctcttgatcatgagatgatcagactgaaagaggcattaaaaagaaaactgaagtttaagcaatgctgtgataattaaggcagttgaaatgaccagactgagtgaaattaatccattgttcaccatgaagtccttcaaagccgtagaacaaaatctgccattataatctcaggagtcaggatggtgacttttttcaaaagccattaagaccaaaggtaccctcgtcctcatactttttatcttgctgcaacctattttttttttttaaacagcaatatgttgtgttctatagtctctcacatagtaacacagctgtgaagagaaggtagttctcaggaacctatttgaagctactctagcaactaaagttcaatgttcttaagctaaggagaggaagtcctaatagctttacattcgagactgcctcaccttgtgaaagattatcttctgcatacaacacagaagttctgttcctgcttccctggcccatctgctctgcttctgtacagacctcccactgcatttttcattagctttttagaggatctataataataagataaggaagatttagcctctcatccatattaacatgcttccagtgtaacagtattgaattttgaggaaccattttaggaaagaatcacaatcacaattttactcattcggttcttctctgcctcaaattgccggttggagacaaattcaccagtcactgcaaatattagctatggataacacacaacatatggcaaaaagccagaatatttcatagatctgagtcaggtgactccggtgattagtgaaacatcatacatttctacccttgagctgaacaggaatgagacagtcaaggaaaggactagaaggcagctccatatggtgccaagacagcctgtcagggctattggagggatgtagcttttctgcttagtactgtctagaaatcattgattcagagaatgttgtgcctggaaagagcctaagactcatcttcaaaatgaggatgctgtggtaacagcctttttaaagttaaagacaagcctagatcccaggaacctttcttttctgtcttctactaaatgagccactcatctggagaaaaatgacatgaatacaaaattcaatgaggcttgaggcatctcaaagccaagggtttggctgaacatatacgtttacagaattgtaaatgtttaaattaaatatgaccccataggcagaggtaataagaaggaaaattatttcagaagtcatgacaaacttgattcaatatttgtttgtgtataattattagcattgtaagtcagagagatatttaagacagtcagtctggatttcagctatctctccagagattcttgcagaaaaaaataataaaattagaataggtgcatgtatagttagtgggagtagttcttagataagcaaacatagacaaagaatattgtttagcagattactattctagagacctcaagaggtttgccatggatttttgatagcctgcaggattgtttaaatcagcaaattaaataaacataaaagttactaactgtacctatagcaatttaatcagcaaattaaataaacatataaaagttaccaactgtaccttcagcaaatgctgttggtgctgtgtccacaccttttcactgttactgctttggggcattctggcctgacttcaaactgctagtacctccatttttttgcatctctggttcctacagcctgctttgaccaccttcacagcaggactgatatgctggaaaattaacattccttaggatcagctcccaagcagtgacttctgggatctgaagaacaaattccccaactcctccctggatgaagatcactttgagggacatttctacactggtcccagtggactcaagtgtcagttacccaccgtggtaatgtgtctggttacaaattcttgttgattccttttcctcatacatctcaattccttacttatctactgatatttcctgagataatatcccatgtaaaacacctgactcaaatatttctctcacttctgggagtacccaaactaagaaaactggtactgaatgtaattccaggaagggattttcagaatgctatcttgaaatggggttgctttcatgatggttggcagcaagatctcggtggtggtggtaagtgaagataaagataaccactggcatgctgccacatcaaaattagtaagactcttcctgtaatgaattgagtgataggggatacattgacttacctagtatcaccagcatttgagagatatgaatacaagctttctgggtgatgctcggtgccctcagtgctccagaggaagaaaacataggcttagggcaggcaactcatgtattttcatgtatttcatgaaagcaatagggcttcattgcaggcagcattgaaagagacccctatcttagtggtatcagactgtactcaaaattagacctaatatttgagcttaatatctgattttaagaataactgggttacaaagaaggctaattcatatcctcagcaagtctcgtatgctaaagtcaaggccctgatggaaagcggggcaggggtgcacttgaggtctgagatgaggacatctgaatagatgtgcttgagaaccttgaaccctcatatttctctgcacagaagtgcccccagttccccttgatggggaatagcagccttctcttgcctggagaagtctaaggaaaagacttcattgagatagatgctataaaaaaataccataaacttggtggcttataaataacagaaatttacttcttgcagttctctaggctgggaagtccaaaataaagacactggcagagtcactgtctgatgaggacatgctatctggttcatagatggtacctttgcaccatattctcacaaggcagcagggcatgacagctctctggagtctcttttataagggcactaatcatattaatgagaggtgaggcctcatgacctaatcacctacgaaaggccccacctcccaataccatcaggttagtaattaggttttaacatatgaattttggggagacccaaacattcagaccatagtagatgactaatagtaaaggtaggccttctctcttacagactgatcactaaggtcaagttttagcttggccttcctgggaaatacactatcacccaccaaagagctgtagtgggacctcgagaaaatagctggtaatagatcttgaggatgctgaactggtggtggggacagaatgtaaagctaaataaaagagagtttactaatatggggaattgtcttgtgactcttgttttaatgtcctggaaaagcccctggagataatcctaatgtgtatttgagatggctccttggagcttggacacaaagatgccctatagtataggagataaagatgcaagaacttccttgacagaatatagtggaagggatcaaaaggttcatagaggtgagcaaggcagaattcacttattatcaaagcactcactgaccgggttcctcaggaagcctgcagaagattcccttctcaaaagcacaaaggaaataattagtgaggggagagccagtgatattgagaagctcatggtggctgtcccctgtaggcaggggcctgatggtagtgaattctgctaaaaacaagttgacctagtatcaacaggcatgatgagattgcagattggcatagttcaggtggcaactcttagccatcagaggcaaaggggatgtaatgaccataatggtcagcaagatcagaataacagagaggaatctctagtctgctggaatctgtggcgatggctaagaggcctcggtgttcctagcaatgagatagatggacaacctggaggatggcacaccccatggagaaggcatggaagctctgtgcctctacctgcatacctcaccccatgcacctcttcatctgtattctttgtaacattctttgtagtaagccatacaatgtaaagcagtgtttccctgagttctgtgagctgctcacactaattaattataactcaagagggggtgaggggaaccccaatttatagccggttagaggcacaggtaaaacaacctggggcttgtgattggcgtctgaagccaggggcagtcttgaggaacagaggcctcaacctgtgggatctgatgttatctccagcagctagtgtcagttgaactgtgttgggaggacacctggctggtgcctactacagaactgattgcgtgggtggtgtgtggggaaaaaacccacacatgtgtacagaaaagtcttctgtgtttattcttttggtgtgacaacagaggagaaactgttttttctacacagcagtagatatgcagctaaaaattccaaggtttcgatgtgtccattttttggaccagtcattttttccaagcagattgaatacagttatccatgttggaaataagtgtttgacacaaccaggttagttagaacctctgtgttggggcttgtttctcattttcttgtgtgcggaatgggagcatttcaagccacctcagaggggccagatcgttaccaaggctctatctatgcggtatgttagaaattgatgctggactgctcagaacagaaagaaaatacacctgaggtgtactgagctcttatacagcatgaaagggatccacaactccttcctggatactcccagggggagatcagttaaaaagctaagcacctgaaaaatatgcagtgatcccacagcaaagatcttaaaatattgacagcctaagccagcagctaaaggaaggctatatttgagaagtggatgtgcacacccaagcaaacttgtgccgaagtcagcaaggaaagactgctgagcctaaccaggctgaaggaagcagcaccaagttcacttttcgttctacccaaaagatttccaagggtggccctcaggcaacccgcagtgggtcacctggggtaataagtaaactgcagaccctccaagtcctctgcacatactatagaacagaatttctgaaggcatagctttggaatctgtacttttaaaaaacaagttcctcaggttattattcaagcagtcatcaaaaatcattgcagtttatccagaaactttttacctctttcttcacctgggtaactaccactttgaagaaaattcaaaggatatcttctccaggaagacttccctcaagcagggttaaatgcccatcttctgggctcccctaagcacagagggcataacacatgatcactcttattgtatgcactactatcaagtgcctgttacttgccagttcctagagggcaagaactatattttcttcatactaacttcccctggatctagcatgttcactaactcatgggccacttcaactaaacctagaatgaaatgctgtcagagagataaatcacctgctataaactttatttagggccctgggtttagaatccagtacaggatggccactggtggctggggataggagtggtgaattaaagtaacaaaactttgtcttcttgctctccccacttattgtctgtgatttttctcctatagagcatctctcttcttcctttgtttcttctcacaatccagaagtttctgcttctcatatcctgttaggctcagcccaggaaatcttggggattcatttctagtttcacaggaaaaacattgaattggtcacttaaaaagggtaaattttgagatgtgaactatatctcaaggaaactgtaaaaaaaatatatgacaaagaagaatcccatgatttagtcaatgccaaactcttaggaaccatgcactatactctggctttctgagcctgcagctcttcttctctttttggtccttttttttctgatgtgcaatctgcttccttgctaatgtcagccttgatattctcacatcagagtgacgccagtcccaaggcctcttatctggtttctaacaaccccctgctttgctaattcttggtaattgagctcacctgcttcaggccacacactggactctgatattgacttctaccttgctcttacatggcagcaattgcacaggctgggtgcctattcccacagcccctactacccattacctgttcctctctatgcagctcccacctctcaggcatttgagactctcaggttctcagaaatcttctcagataaccctcagggtgagcataatccactgtgtcccactctgaaaaaatgcacttgaggtcatagctcaccattttagttaagtattaatttctttgttactagctccagggcagcagagtggtttgagggaatgaaggaataaaagaacatgtgttccattaagggggttttccatctcaccctacctttccctctttgtctcctgagtcttccaggtaggtgctgcttctcttttaggcacatctttctctgcaggagtaaactagggatttaaaaaaaaatgaggaaacaggaaaactggaagatgccagaaggctgcatatttaaaacctgagctggaaaagaaagagaagcaaaataagtctgtatagtctgactttggagccatggcatgaggcagaagtcagactttggaaaagttatgagacatgaaagtgagagagatgagaagggaaagaggcttttaagaaaattttctgtgaataataaatatattctccctttggcgattcttctagtaagtaataaattgcttttcaatttttttggctatgggaggttttttattgcaatatcatgataatagagcctagagaaggggtggcctttatatgggtgatagaagcatgtctagatcctgaaaccactgttcccaggtggtggcttccccctgtaatgcacacgtgggtcactaaacccagataaaatagcttttgtgacataacagataaggaaaacagaattcttggaaagactgatagcgagagagctgtttactggccatagcacagggacagaagttggggaatcagagtggcgaggaaataacaatttattccttatgaagtagctaatgtgattagctttttggtatgtgtgcatggagaggcaggcagctggagacagtctttttgatctctggctgtctgagtagaggatcataccagtgggtggaggcagctctcagatctcccgctctgagcaggagtctgactctttgaagtgttcccctctctacttttactgctaacagacagtgaggaagaaggctacgtccctagggcaggtcaggaggccttgaagtttccccagtaagaggaatttaacagagatgaccatgggaaaggctgtaaagtagttcaagctgcatttcaacatctctccattaccctttggctccatccctatcccaggtgaatagcaggtatatttttttgcttctcctgattactgaaagcttttccatggagcccttatcggcctagatcatattctatgccataaccttcctcgtctcccatcaaaactgccctgaacccatttcatgaggtccttagtgtgaaccaaattcatactggtctctagtgacttacagcaataataatacctaacattattgaaggccaactatgccttaggtcctattttaaggtctctacctctgttagcttttctaagacttacgataccccttttataaagttggtgatattatctgttcaaatcacttaaggtagacaactgactactgtgctaaaaatacaacacatttggcggccaggagcaatgtatgatctaataattatatgaaaactccagtcttgatttcaccaagatttcagatctcttcctgaaaattcttgatgattccctgtttatgtgcccataacagattaaaaaaaagagagcagaacaaaacactctttatattagcttccaattaaaaacttcaaaaaccaaacaaaaatggtgtataatttataattattttgatatagtacatcacataatgttcctagcttagattgtcttcttaagatatttcagaacaagaagagatattctgttaatattacttattggacatcatgccagtcacatatttgactggagcataaaacaaatgaccaagacagacacagcctttacacttaaggaaattaaaatttagataaaagattcttgagaatacttggtataataccttgccactgtaaattggatttttaaaattttgttttattaaacaaagtgtttaaacagcaataattacacccatttattttcatcatttcattgtaatttttatgtgttttctattcatccaatggctgaattctgtttttgtcttgttttcacctaacttttgatagtgaaatttaacccatttacatttattgagataactgatatgtttacactcatccctatttcagacagactctttgttttactttattaactaggttatgttttgttgcaaggaacagacaattggacaaacattggcttagattatggtggtagttattaacttaatgaaaagtataatgttaggtggctccaggattgatttagcagtgccatatcaaggtacatggtgttcctctactaaatttgcttgtctttttttttatggtttcatgttggcttctcagcacaaagtatttctttaccatgcaacaacattcaaaaccagttagtatcaacaaataatactgatataatatttattttgtatcaggactgttccagagacttcacagatattactcattttatccttagggcaacctatcagataggcattattatcatctccagtttacaaataaagactgaaacacagagaacaactaattaaaacattataattaatcctttttccatttgccctgagaatactcactggtggcacctgtggctgcagcatttagcctgagataactttgccacaaaatatcttgctttcattattattttcacctcgctctagtatattgactttggaaacaaagagatcattctatttatagcattctgttttaaggagtggtatttccacttagaaagtatagtaattcttgattgctgaaaatgtccaatcctagaaaacatagcattcctatgggttatagtaacatcattatcaaacagtcattggccaaagattcacttgatgattctggttttctgaaatagatgattctgatgattcagacaattctgatgttagttctgtttagaaatagctccaaaaacagtttttatattttattttcacattgaaaattagtcagatttgcttcagcctcaaagagcatgtttatgtaaaattaaatgagcgctgacagcaagctgcactttttttttttttctaaatgggaaaagggttttaagggagaaagggctgaccgccccagatctctgaaagtagtttcacaattcatgccttgtcacctgacctgagccctgattccgctctttgtggtctgagatctgagcaccttggaggcattccactcctactgcttctttcttgtgtattttcagttctaatttttttgtttgttttatttctctgcataaatattttcatcttctctctatgtttctggaaattgctaatatttctggattgcttattataagcttgctttcaaatgctgctatgaatttcttattttgaattctgtatattttctgatatttcatgtaattttagatgtgtaagaggaatggtttatgttctcaatcagctctcttgaaagaactcaacctcactattttaaagatgaggaaacaggccaggagagacttgtgagtggttagcttaattagtattacaaagtgaactaaagactgaattgtctgtgggcatacactgagtttgatgccagtggggacttttagtctgagaatttacccactatcttatattttgtctctaaaaattgttttaaaacaaaatagaactttagttcttgcttactaaaacatctttagcttatttattccacaggaattcttctactataaaaagcatatacattatagataaataacaaaataaataacctcttatcttaacattcacaaataacttctctaatgttttactatatatcattcaagtattttttgaaatgatatgtataattatttttgataaaatatgaaacaatatacacatagcttttcagcttaacttttaaaacattcaaccatatattgtgaggtttctccatatattatgtggatccttttaaaacatcacttttaatgactccatggttttctattatatagatttaataaaaatttaagcaatgcaatattgtttcaaatatatgataatttataaatggcagttttccctgagctcaacatgaaagatatcaggtaccaaaatggattgtgaaatagatcattctttaagaattgcaagcagagtcaaaaagctgttaaatgctcttgaatccctcacccgcatcaaggataaatatggttgagaaattgctcatgggatggtttctttggacaaagctatgctctgggaacccaccccaaagggaagagatagaggtgcctctaactttacctcaagtggaaagaaaggggctccagtgggactacctggaaggcttcagttattttcctgaaataacccttacaaagtcttaaatccagagatgagttcactgaaagcataagcacagaagaaatggttgtgttgcaagcttagtatttcaagctgtgtcaagacaaaatgacagcatataggctgtgcccaaaagaggtaactggagtttacatcttgtccaagaggatcaaaggtaggggcactaagaccccggaaaagataatctagatggggtggactgatacgggaatggccaaacagacaaaaatgcaacacatcataaaaaaatacagattaatttcctcactagggccccctaggaactcatgaaggtactgaagagaaaatgtgaacttacacatctgccaggctcagatgtcaagtaatcttcacagtagtaccaatcaatttagaattttcttgcccctcatgttttctacactatggttctagatgaaattcaggaaaaaaggatctttttttcaggaaaaaaatagtaatctctaaaattattttgtctgatattattattttaatattatgatgttattatttaaaatgcagctatgtagcataatatttgaattatatcaaggtttcatttgttgtttagcctatgttcattcatttatttgaggaaatataaaattaacttttatttactcagcaataattttatcgcattcctcctatgcattgggcattgtgttagtccagcagtaaacaaattagataaaaatccctgccctcagataatttatattcagaggggaggggcagacatcaaaaaaaaagataagaaggaaaatgcatagaatgttagatgttaaacagtgttacagaagaaaggagcatagaattaggctagggagcatcagagtggatggcagacttcagtttagatgggataaagtgaaggtcaggcaggataaagacctaaaggaggtgagggaatgagatatgcagacacctgggaagactattccaggaaaagggaacagaatacgcaaataaactgaggcgcaaatatgcaagaatgttaaatacaaagaaagaaggtcacagaagtaagtgaagggcagattaagaagagcattctaggttattgtaagaacttggttttcaaatagttgatgtttgtaattattacgcataagtcctctgcattcttgcttatgtatttgtttttatatattattctatccccttagtctgtttgagctatccaagtttgaaagttgtgctaaaatatcctcctaatgttatggttttgtcgactttttcttatttttctaatagcttttgtttgatctatttcaatgcaatttccttgggcacataaaagtaaatgagaattaccttcattgtagattatacccttcaataataaaaagtaaatcattttgcctgatgtaatgtttgttacctgaagtctattttgtctgatattgatattgccaacctggctttctttttgtctgcatcttatttacctgaatacctttcatacttaaccttttgtttgcctatttttgttttttagtctattacggtgtttgtgtaacttttatttatttcttttcacatcttttggtggttttctaaagttttctttgtactacttttcctttcatgttgtaatctatgcgttttctcctcctgccttaatgattacccttattttaaaaaaaattgtccccttgtatttatggtccacctgtgtttccttgtcatgaaaattaaatgttgtttacatgagataagaaaggttttccatttctacttcttcactgtggtcatcacaagccaggttcacacacttaccatctaagcctgcatgttcacatgcgcatagatgtgcacacacacacatgcaaacatgtgcacacacacattgtgtttgctattttacatgtctagagtaagacccatccaccgagttttttgcttttgtgaaaatgaatctttgaatctcagaccagagagccatggaggagctgtctcagcaaaagataaagagcaggatctttgttctcctaaatcctcagttccttggatgatactttaaactctctcccacctctgcttgcaccaggattgcaacagcagaagcccagagagatgtcaagcggcttaaaggaaattgtatgtagtggaaaattcttttttttattaaaagctatttatctttcttatctttttgaatatacggctgcttctggcttgcctctgtgaatccacacggctgatcgaatctctgcctcattgtgctcatttattaaaagctgaattccaatatcagccataggtgattcctacatcaagggacagagtcctactatgataattatggcaggaggtcaggatgcagcctgggggcaagacagcagtcagcctgaagcatcccaaagcctaaggatcctctcactgctggctttctcaaggagactgacggttcctacctttctctgagccaacccatgtgcctatgttatgctatttaatttttacaaaagttctatgacataggtgttataatcctcattttacacattaaaaaattgagtttcaaagatgctcaattcatgttagctagaggtagacccaggattcaaacctacatgtttgaccccaaaacttacactcttctgtaatgatgcttttaagaatgggaaaaagtggcgaatgggaccatcatcattacgttaagctacagacatttagtttggggctttcacagactcaatttactttatttgctctagcaaataaagtacattttgacctaatctgcatttttcaaactgtgctccaaagccctctagaggttgcaaatgtgagtgaggaacaactaagatggtctgctctgggctactgctgctctttgatttatttgtttaaacctccgtatgtaaggttttgtttggaaatacaaattcaccttctacagcatacttaagggtggtggaggatgaaggaaggtaattttatagaagaagtctagaaagttcaggccactgtagaaccaagacaacatcggctcttgctcctacttcactgtatggccctggctgcaaagcagctggcgtggatggagacatgagccaagaaaagagaaagtttacaggaactggcaagaatgaggatcaaaatgggtcataagtagcaaccccagggacactattggcaattaccaatcaggtccaaactgcacaagataaatctaacttagttttctgtattaatgaggagagacggggaagaaggagcgagcatggtcactattttagaattggagacaggtattggtaatagggaaaggtattggtaataggggcattattgtattgtagggacagcaaaagcatagcttcaggccagcaagagagagggcctacatgtgactcaaaatccaaaatgacatccccaagcccacgaaaaaaaaatgtaattgtgggcaattttgaaaatgtattacattatgcaaattgaaaagtataagtccccgttgtacttgtttggagacacagtgaaatcctaattttttctatttagatataaaataagcatcaaagaaagagccccacctccatctaatggagaggactctctctacctccaggctaattgcctagaccaacttgaattccctattctaagctaataatggagagtgtcagggactgactgggttatccaagttgaagccatcaggcaatacatcagagaaaagaagagggtaaagagggccaggtcctctgctgtggctggaatagaggataggactacagtatggcatagagaatgtatctgggaaaggagaacaagaagatgggtcttccctcagagaattcatagaaagtgtcagctggtcagcctcttgctgtcaacctgaggtgagacaatatggcagggtgattatgggagatgatgtgcagataatcagatgtggagagatggaacagggattcataagcatttgttgtgaacctttaatctcaatatttgttgcattattattttgaataatataattttgaatctcttactttcagcttttattttctttccaaaagatctataaaaacccagcccttccaaggtactcaggaaattaactgcaaatatttattatgtagcctgctgaagagagacctaagtaactggggttgtgtgccctcgcatagaaaagacaaagttcagaaggcaggagtggatggtataacaatttgttgcccagtgggattggaagtgaatgaggggaggaaattcaccataaatgcctgaggataattctcaatattcatatcttcctcctccaaagtaaattagatggggtctgcgcaggtgagtctgaaaaatccccaggtagttttcgtccatgcccccaacttccagttacttgtaactgacacaaaggcacaggatgtaacaaatgagctgccacctccatgaccacaacagaaaagttttggtggttgacactaggaaaaagatcttccctttggcaattatgtataaccaaagacatctttaaaggaaaattagacagaatgcattgagtctgtctaaacaaaatgactgcttttttgattttgtggtatataagtaaagtttggtaagaccatggggcacattttgggagcttgaagccacagctcatatgcaattcctcttcttgacacttccaaatgtgtaggaattatgggaagaacaaaatagaacctttccattagtctaggatattctgttttgttcattccctaagcattgtcctgttagcccatctccccagaacattctcttgaatgtcaatgaagttttatcctcaccttattgggccatggaaatctcaaggttattattctcccttttgctctctatcctgaaaatgtattcaaccttactaagaatttggtgttaatatttcgcaaacttatttgcatgtctttgttttctacattaaaatggtcatttgaaattgtggtctacaggacactaacattcaccccttccaaaattcttcttccgtcctaccgtcaatttgtcaagggatacggaggttcaccattgcataattccagaagggaaaaagaatagcacatctttttcctcttatatacccataattatctgtttctcctgggcagatctatgcctccaccctaaaaagcagctccttgaatccttccctggactctatttttatctttgcagtgtggaagcctaaaaacatgtgagggggatggagtttgggaagcttctatacatgcctgcaccacagcacagccttgactgctgtctgcccaaacagctggacatttctgcaagcaagcaaacagaaattaaatacacaaaacagccaaaccagttgtagggtatgatggaaaaaatatccccggagcagggggtcctggttcctccactagaccagtgataagatactcaacctctttgggcttaaaaactggggtaacaaagactgtaatcccacaggaatatttactgcttttagttgcccagcattcatcctgtatgctgtgtgtgtgtgtgtgtgtgtgtgtgtgtgtgtaagagaaagagagagagagagagagagaaagagagagagagagagacctatagctcccagatctctttggatgtgttctttgccatccacccttgtgcagctctttctggaggaccacccttggttggctagaacatgctgtgactgcacacctgaagaaaggaaagtgcctgggtgcctgaggatttacaggctaccctgactcctttgcccaggaaaaggccagaaccaatgacacacccgtatcatactagaaagcctgatgggatcactttgaagctctgtttgcactctacatctcccctgcaggatcaggctgaagctatattcagcataacttttcctgagttcctgctcctggttcacattccccctctttgctgtcctaccccccacatccttatggggcttcaccagctaaagcatcattagcacacacatcctcatctcaagatatgcttctgggaaacaggaactaaaccaagaaccatccttacatgatcataggcagtcttggtgggactatcagtcagatgccctgtatgtcatggtccaagggtggcctgcaaagcaaagcattaatcagactctctgatctggaaatctgcatcttgatcagatgacgcaagacaagaagctggtccccatggtggtgatctaaagatactggtcactcattcctacccacagatcctcagagagcactgattcctcccctttaacggctccatttgctcagtttttcttcctttctctgagctgacctatatactcaaaacaaattattttttggccttccttatccagagttgcttgtgattaaataaccccaactgacgtggaaatcaaataaagcaacaaagaactgctttttcaactgtgagtactactctgaagtcatctgtgattattgcataagcagtccctcttagtaatgttttgctgtagtgtttgacatcaccaaagaacacctatacttgacttctccttgcttttgcctgtgcatttcacagtttcagtatttgacaagtgaactttctgaaactaccaaagacaacagcacacacttcatcagcatttttgtttattgataccaggattagcattttctagaaacataataaagtaattgcagacatatttgccttatatttgtgaatttatcaatttatggcatagattccaggagcatgttagtttttagagtagagatgctgatatcccttagctatatatccagaaaataacaactatgtagcttctaaatttttacatgaatatttccaatagtccagcttaatgtgtggctttacaaattataatttataatagtcccctgtcaataaaagtatgaataataacatggttatcttttatagtgctttgtagtttatcatctaattttttaggttgatcttcaagatacctttacatgattactttaattgagatgagaaaattagaaattttcagatgagaaaaacagggttgagaaagcttaagccacttccaaatgtcttagaaatattaagtggaactatacctttatctttttctttaaatctttataatcttctttataatctttttttaaaatttgtttatttattattattatactttaagttttagggtacctgtgcacaatgtgcaggttagttacatatgtatacatgtgccatgctggtgcgctgcacccactaactcatcatctagcattaggtatatctcccagtgctatccctccccgctccccccaccctacaacagtccccagagtgtgatgttccccttcctgtgtccacgtgttctcattgttcaattcccacctatgagtgagaatatgcggtgtctggttttttgttcttgcgatagtttactgagaatgatgatttccaatttcatccatgtccctacaaaggacatgaactcatcattttttatggctgcatagtattctatggtgtatatgtgccacattttcttaatccagtctatcattgttggacatttgggttggttccaagtctttgctattgcgaatagtgccgcaataaacatacgtgtgcatgtgtctttatagcagcatgatttatagtccttcgggtatatacacagtaatgggatggctgggtcaaatggtatttctagttctagatccctgaggaatcaccacactgacttccacaatggttgaactagtttacaggcccaccaacagtgtaaaagtgttcctatttctccacatcctctccagcacctgttgtttcctgactttttaatgattgccattctaactggtgtgagatggtatctcattgtggttttgatttgcatttctctgatggccagtgatgatgagcattttttcatgtgttttttggctgcataaatgtcttcttttgagaagtgtctgttgatgtcctttgcccactttttgatggggttgtttgtttctatctagtaaatttgtttgagttcattgtagattctggatattagccctttgtcagatgagtaggttgtgaaaattttctcccattttgtaggttgcctgttcactctgatggtagtttcttttgctgtgcagaagctctttagttgaattagatcccatttgtcaattttgtcttttgttgccattgcttttggtgttttggacatgaagtccttgcccatgcctatgtcctgaatggtaatgcctaggttttcttctagggtttttatggttttaggtctaacgtttaagtctttaatccatcttgaattgatttttgtataaggtgtaaggaagggatccagtttcagctttctacatatggctagccagttttcccagcaccatttattaaatagggaatcctttccctattgcttgtttttctcaggtttgtcaaagatcagatagttgtagatatgcggcgttatttctgagggctctgttctgctccattgatctatatctctgttttggtaccagtaccatgctgttttggttactgtagccttgtagtatagtttgaagtcaggtagtgtgatgcctccagctttgttcttttggcttaggattgacttggcgatgcgggctcttttttggttccatatgaactttaaagtagttttttccaattctgtgaagaaaggcattggtagcttgatggggatggcattgaatcagtaaattaccttgggcagtatggccattttcacgatattgattcttcctacccatgagcatggaatgttcttccatttgtttgtatcctcttttatttccttgagcagtggtttgtagttctccttgaagaggtccttcacatcctttgtaagttggattcctaggtattttattctctttgaagcaattgtgaatgggagttcactcatgatttggctctctgtttgtctgttgttggtgtataagaatgcttgtgatttttgtacattgattttgtatcctgagactttgctgaagttgcttatcagcttaaggagattttgggctgagacaatggggttttctagatatacaatcatgtcgtctgcaaacagggacaatttgacttcctcttttcctaattgaataccctttatttccttctcctgcctaattgccctggccagaacttccaacactatgttgaataggagtggtgagagagggcatccctgtcttgtgccagttttcaaagggaatgcttccagtttttgcccattcagtatgatattggctgtgggtttgtcatagatagctcttattattttgaaatatgtcccatcaatacctactttattgagagtttttagcatgaagggttgttgaattttgtcaaaggctttttctgcatctattgagataatcatgtggtttttgtcttcggctctgtttatatgctggattacatttattgatttgcatatattgaaccagccttgcatcccagggatgaagcccacttgatcatggtggataagctttttgatgtgctgctggattcattttgccagtattttattgaggatttttgcatcaatgttcatcaaggatattggtctaaaattctcttttttggttgtgtctctgcctggccttggtatccggatgatgctggcctcatcaaatgagttagggaggattccctctttttctattgattggaatagtttcagaaggaatggtaccagttcctccttgtacctctggtagaattcggctgtgaatccatctggtcctggactctttttggttggtaagctattgattattgccacaatttcagatcctgttattggtctattcagagattcaacttcttcctggtttagtcttggaagagtgtatgtgtcgaggaatttatccatttcttctagattttctagtttatttgcgtagaggtgtttgtagtattctctgatggtagtttgtatttctgtgggatcggtggtgatatcccctttatcattttttattgtgtctatttgattctttttttctttattagtcttgctagcggtctatcaattttgttgatcctttcaaaaaaccagctcctggattcattaattttttgaagggttttttgtgtctctatttccttcagttctgctctgattttagttatttcttgtcttctgctagcttttgaatgtgtttgctcttgcttttctagttcctttaattgtgatgttagggtgtcaattttggatctttcctgctttctcttgtgggcatttagtgctataaatttccctctacacactgctttgaatgcgtcccagagattctggtatgttgtgtctttgttcacgttggtttcaaagaacatctttatttctgccttcatttcgttatgtacccagtagtcattcaggagcaggttgttcagtttccatgtagttgagcggttttgagtgagattcttaatcctgagttctagtttgattgcactgtggtctgagagatagtttgttataatttctgttcttttacatttgctgaggagagctttacttccaagtatgtggtcaattttggaataggtgtggtgtggtgctgaaaaaaatgtatattctgttgatttggggtggagagttctgtagatgtctattaggtccacttggtgcagagctgagttcaattcctgggtatccttgttaactttctgtctcgttgatctgtctaatgttgacagtggggtgttaaagtctcccattattaatgtgtgggagtctaagtctctttgtaggtcactcaggacttgcattatgaatctgggtgctcctgtattgggtgcatatatatttaggatagttagctcttcttgttgaattcatccctttaccattatgtaatggccttctttgtctcttttgatctttgttggtttaaagtctgttttatcagagactaggattgcaacccctgcctttttttgttttccatttgcttggtagatcttcctccatccttttattttgagcctgtgtgtgtctctgcatgtgagatgggtttcctggatacagcacactgatgggtcttgactctttatccaatttgccagtctgtgtcttttaattggagcatttagtccatttacatttaaagttaatattgttatgtgtgaatttgatctgtcattatgatgttagctggttattttgctcgttagttcatgcggtttcttcctagtcttgatggtctttatattttggcatgattttgcagcggctggtaccagttgttcctttccatgtttagtgcttccttcaggagctcttttagggcaggcctggtggtgacaaaatctctcagcatttgcttgtctgtaaagtattttatttctccttcacttatgaagcttagtttggctggatatgaaattctgggttgaaaattcttttctttaagaatgttgaatattggcccccactctcttctggcttgtagagtttctgccgagagatctgctgttagtctaatgggcttccctttgagggtatcccgacctttctctctggccgcccttaacatttttttccttcatttcaactttggtgaatctgacaattatgtgtcttggagttgctcttctcgaggagtatctttgtggcgttctctgtatttcctgaatctgaatgttggcctgccttgctagattggggaagttctcctggataatatcctgcagagtattttccaacttggttccattctctccgtcactttcaggtacaccaatcagacatagatttggtcttttcacatagtcccatatttcttggaggctttgctcatttctttttattctttttttctctaaacttcccttcttgcttcatttcattcatttcatcttccatcgctgataccctttcttccagttgatcgcatcagctcctgagacttctgcattcttcacgtagttctcgagccttggttttcagctccatcagctcctttaagcacttctctgtattggttattctagttatacattcttctaaatttttttcaaagttttcaacttctttgctttggtttgaatgtcctcccgtagctcggagtaatttgatcatctgaagccttcttctctcagctcgtcaaagtcattctccgtccagctttgttccgttgctggtgaggaactgcgttcctttggaggaggagagtcgctctgctttttagagtttccagtttttctgctctgttttttccccatctttgtggttttatctacttttggtctttgacgatggtgatgtacagatgggtttttggtgtggatgtcctttctgtttgttagttttccttcaaacagacaggaccctcagctgcaggtctattggagtacccggccgtgtgaggtgtcagtctgcccctgctggggggtgcctcccagttaggctgctcaggggtcagggacccacttgaggaggcagtctgcccattctcagatctcctgctgcatgctgggagaaccactgctctcttcaaagctgtcagacagggacatttaagtctgcagaggttactgctgtctttttgtttgtctgtgccctgcccccagaggtggagcctacagaggcaagcaggcctccttgagctgtggtgggctccacccagttccagcttcccggctgctttgtttacctaagcaagcctgggcaatggcgggcgcccctcccccagcctcgctgccaccttgcagtttgatctcagactgctgtgctagcagtcagtgagactccacgggcgtcggaccctctgagccaggtgcgggatataatctcctgatgcgctgttttttaagccggtcggaaaagcgcagtatcaggtgggagtgacccgattttccaggtgccgtctgtcacccctttctttgactaggaaagggaactccctgaccccttgcgcttgccaagtgaggcaatgcctcgccctgcttcacctcgcgcatggtgcgcgcacccactgacctgtgcccactgtctggcactccctagtgagatgaacccggtacctcacatggaaatgcagaaatcacccatcttctgcgtcactcacgctgggagctatagaccagagctgttcctattcggccatcttggctcctccttatacttttatctttttggtcttttctgaatttaccatctgtttgagttatccatctctgcatagtaaactacctgaaaacttagtgaataaaactaaaatgtattggaatccatcatgggtctgtgggttcactgtgtgctcagcttggtaatcttcgcttggagtctctcattgatggaattcaggtaactgctgtagctgaagctactggaagatttgactgagttggacatccaagtagtttctactctcacattcctggcatctggcttctgggatgaatggctatttctctctctctccctctctctttgtttttctctctcttctttctctctctccacatggtctttccatgtggctagcttaagcttcctcataccatggtggctttggagttccaactgctgtttttctaagggagagaaattagaggttgccagtctcttacacctgggcccagaagttggctcagtaatacttctaatgtattctatttgtcaaaacaatcacagggtttgccatattaaaagagtgaagaatagatactgactttcagtgggggaactttcaaacaatgtgtgatcttctttaatgagacacatcataagaatgagaaaattgaacatcaactgatacattttctcaaaattgaaacagaaaaaagaaaacaagtcacttatttgatagtcactttttttctactataggcattatgtctgacatgtcaagatacaatttgattgctttttgtttgtttcataatagaattttagggtatgtgaaccaaatcacattttccaaggacagagtctaatatctacaagtctgagagaatctattttcttccaaattgggcctttgcctctcagtgatttgtcattattgtctttgtgattcgagagggtggactatagattccacctcctcagtctcacacagctgaggtgaagaggatgatatctgacagagccagggaaagcaaggatgttagttttttttctttgggggttgttttgttttgttttgtttctgtgagcagctagaataattttcataggtaaatatagatttaatgatgaagacaacaaaagatgtgagtgtttgttaataaaaatggaaattatattcactttccagtttcccatggatacatgtgacgagtggtgggctaatgagtcgggttggttagaattcagcaaccaggccaggcgtggtggctcacgcctgtaatcccagcactttgggaggccgaggcgggtgttggtcgagaccagcctgaccaacatgcgaaatcctgtctctactaaaaatacaaaaattagccaggcgtagtgatgtgcgcctgtaatcccagctactcaggaggctgaggcaggagaactgcaggaacccaggagccagagattgcagtgagctgagattgcgccactgcattccagcctaggcaatacagcaagactccatctcaaaaaaagaaatagaaaagaaaagaatgcagcaaccaagttctctgtttaactccttaatgttcctgtttaccaagggtgacagtatgacattacatccaatataatacttaggagtgagggctctagagcttaactccataaattctgattgcattgcttactagctggagaactttggcccagataatcagcctctctgtgcctatatttccttttctgtgatatagggagatgtcatacctatttcagaggtttataacaattgagatgctatgtgcaagtgagaaacagttagggggctacatactcaggtgcccactgtgcatttgcatgaccctaagagtgagagactccttaaagtttacaccgtaggctcttaatttgtgttactataatccaggccctgaacatagagtcttttaagtatcaaaccaaaaaaatctatgtttaacattcattggactggtcaactagtaccatttatcactgttaaaacccctaacattgggtatgttgattaatagagcattggttactgatcaaatacagagcacagaagcccctggagcaactgccctggagtgtggtcctttttgatactgatacgggagcggggcagggaagtgctgggaaggaaacggagtggtccctgcctagggctccacctccggccctgtgcccacggacctaggtgaggacgggcactcctgcctttgtgcccaaatgttgcatttcccaagaccaccctggcccaccatgcccccgtcgtgtgcctataaaaaccccaagaccctagcaaacagagacacaagtgactcatcgtcgagaggaacacaccagcagaagaacacacaagcggctggacatcgagaggaatgcactagtttaagagtacaccaacaggcaccagcaggccggcaggccatcaaccggaggaacgacatggagtttgactggggagtcccgactccagggagaaaccatcttcccactccatctcccttccggcttccccatctgctgagggctttttccactcaataaaaccttgcacttattctccaagcccatgtgtgatccaaatcttctggtacaccaaggcaagaaacctcaggatacagaaagccctctgtccttgtgataaggcagggggtctaattgcgctgactaacgcaagctgcctacagacagcaaaactaaaagagcaccctgtaatacacgcccactggggcttcagaggctgtaaacattcacccctagatgctgccatggggtcagaaccccacgacctgcctgtctgcatgctcccccaagaggtttgagcagtggggcactgaagacaccagccactccctctgtcacacactctgtgagggggataagggaacttttctcctttcactatgacacaagtaaccacccttaaaccatgaattcttgattaaagcaatgactggctagaaaattaaatcttaaggtaactgaaatttgcattatcttattttgtctatgctaaagtattttaaagcaaagtacagctgtcataacaaatgagactatcccaggagactgtcaggtgtatgtcagtctcagacatatccagaagaaaaaatgtagagatgatatatccaggaattcttccatcttctgacatataaaattatttcttatctccttcctcacacctgggcctatcctgctgaggtataacagataatcattacttatttggtatttggaccccaaattgccaggcatccacttcccctgttcttcctttctttcatttcctcccaggagccataagttgaagaaagtatttcccattacagagtgtgaacaacttgtgccctcaaacttaataagctcccatttactcagatgtgtggctactggtccctgtcttttgtccctaatttcaacctttctcctaaggaagtgaatacccaaaaagatttactaatttatcaagtgctttggctacattatttgtgaatagtctcctcccatggcagtgacttggacactagggaggatctggctggttcatgtgtcagttgtatttatttttatttattacatacatattcagaaagaaaattatttacctgtgcatttccatggtttctattgccatggcagccaagatattgtattgcaaagacaagaaacagagagacagagttattagtaacgggattgagggggatgtttgcaagcccctggagcaatacttcagatacccagggcttttggggggtagagctcacctgtgggggtggttgattggctgttgttcagctcatcttagagaagtaaaacaaggagatcagataaaatgttggaaaggtaattatgttctacaggagttcagctctcatctttctgggttggtgccctttaaaaaattgatggttctttacgtgcttaattaaagtttggaatggctgctcacctccataaatcatttctcctacccaaggaagcagtgttggctgtggcagtgaggagtaaccagggctacactgaattccctggggctaaaaactgaatgctatttattggagcactggaagaacattttctatgctgaatgccatagttcactctgcagtcactgagagctgagagagttccagctgatgctttctttaactggctgattttctttccaaggcaagctggaagagaagtacattcagaatgacaagggttgaatagcttgaatcatcacctaggtaatcaactgtaatgctagttctctaaggaactaaaagatgaagctttcttttagaatttccatttaattttcccagtttgtctttagaagcaggggtatggttaagtacaagtaccccatttcccagggaaggtcattgaggcccagatggaaagggacatcctaagaggcacacaacaaatgaacaatggaaacaaacaaaaaaaataacgttatgaatttgggatggaattagagatcagagctaacaaactgagctgttatttcctgagcaactctggcttcagtgcaagaatttagcaaaaacattttgtctcctctaatccttctccttagttcttttggagcatttctgagtggggacaatgcccttgtctggtcagtatcacactgggctgaacactggcttctagtcagaatcttctagttcaatcacctttgttttcactcataaagtggtagaatgttaaggtccacaatattgcctgcattctgcagccacccatatgtcaccacctacctgctttatctctttgtcacattttcatctctttctacttcaactttcctttgattcatccccaaaagctttcccctaggccacttggcagtattccctcactagtcaaaatctggtgggtctttcttgagtgagctctcagagctgacctccttttttaagacatctatttgcatgcaggtggccatcgatgacatcaatggttttgcagtattgagccacattttggattttacctagaagatgtgcagaatataaatgttttcatgaggtatgtgggccaatttctcattcaggatgagaaatgttgcagttgaaaaaatttggaaacataaactggctgcttagtttctgtgggtgttttcattcatttatttaatatgaatgcattaagaaatatgagaaaaacagtttggtgctcagaaaatcatactacagtccctctcccctagaagcttacagtttggctaaaaggaaaagcaatataaggcaaatatagtgcaaatcaaataagtacatagacaataaggagtctataaagcaatttaaaggcatagaggatggaaatgttggaagagactttgctgaggaaattgccatcagctgagggtaggtcaaaagctaatagaattaacataaggccattcatgtaaattaaaatacacatacaaaataacactatttttcaaggacatgtgtttgatcccttacaacaaacacattagtgtgggtgtctttgaatagggagaaacaggaatgagtatgagggtaaacagaaaataaaataaaagtaagaatttgctcaaattagtaattataatgtgctatgaaatacaaataattcaccttcaatctttattagcaatgtgacctcggataagtctgtcaatctttatcttagatacagcaggatggcctcatctataaaacgagaataataatatattattttcagagttgtttgtagaatggaatgaaataaagtatggaaagtactgtcttagtccgcttggtctgccataacaaagctctgcacatggggtggcttaagcaatgtaaatttctctctcatagtcctgaagactgggaagtccaagattaaggtgccaactctctttctggcttatagatggccactttctttctgtgtcctcgcatggcagacagagagagagagagaaagagagagagagagagaagaagaagaggaagaagaagaagaagaagaagaagaggaggaggaggaggaggaggagaagttggaggaggagacaaattcaaggagaaagagagagagagggtgctagctctctctggtatctattcttatgaagatattaatcctatcatatcaggtccccacccttgtgactttatctaaccataattaccttaagtcctatctgcaaatacagccatattggggtttagggatttgacatgtgaacgtggagtgggacacaatttagtccataccaagtatctagcacagcttcagaaacatagcaagtattcaaaatctgttctctcttccccaaaccatcaacctcctatcttaaccctttttcacatggtactaacaagataccaaatagagactttgggttaaaatataagtggtgtctattttatagattatcagaaggaataaactcagtaacttatttgaattttgcataatatttcattttatcttttcttattgttttgaaacctgtattttttactcagccatatgttctgaataattatccatttcactaaaggtaagactagatcactttagctagtatataatatcataattctatgtgtgactattctgtaatttattatctattgtgtcattatcttatctgctgattgacatattatctactgattttgatcttatctgctgatggatatattatctactgatttgctattgtatacaatgtcttgatgaacagatgcctacaaacacaattgcacttgtgtgtgagttcatgtgtgtgtgtgtgtgtgtatttgtgtatgcgtgtgtgtatttgtgtatgctcatcttcaggtttcatgcaaattgctacatggctattcagaatattcactgtgctttattttttgactattctcagtttactttgtttcacattctgtgacattccatcagtctagcacctgcaaccattgtctcctccaggtatttctcacattttgtcctctttcccagcctatacttcggcagataacctcaacacttaccttgctgagaagaaaccctgccatgttctgcaaagccacttactcaacttgccaacttttaaaattaaacaccctgaattgggagaatcatgtggctgcactagatttcttgtgttaataaaattcaaattaaatgcaagctctaggccagaagtaaaaggccatggacaagagaaagagtgccaattatttcttccaagcaacagaaatgggacttttctccacctggctggatttttcttttcttttttttctttttctttctttctttcttttttttttatttcaccctctcccttcttccctcacaaactttttttgtcctaactgtgcctatttttctacccctgcccatatgttgcaatgagagacttcttaaaatctcttttcctggcagatgctgatgtgttagctggtcaatagctggggaatgaaataaaaatacaaattttgtgccttgagaatatcaagaggaaactaccctccattccaatctctctgcatatcctattttaccagttctttaggacatcctctcaaggaactctttcttcttcctaaaatacaacttggattaattgagtacttaattatatactctttgccaagtgttttcagagtgtgaattttgtttacctcaacaaaattgtggggaaattttgttttcctcaacaaaattgtggggaaattttgttttcctcaacaaaattgtggggaaattttgttttcctcaacaaaatttccaaaggcagaaattttgtattctcttcttttttctgcctcattcctactatgcttataaatagtaaatagtagggcttccataaacacttattaatagttcaacaaaaatattggagaggtgaggaagaaggtgtggacctaacacttatcctcagatgacctaaaatctaatagtgtatccaggatacaaacattacaatgttaaagaacatttcccacagcagataaggaatcatcatttatatccagctgtagaatggagaatgccaaattatctaactcttgaatcacagtgctcttttcaccaatctcttttatttcatatagcacttttaactttgcaaacttttcaaagagtttttgtctacatacattatgcttcaggaaagaattaaagattttaaaagtcatgaaaaagtttctgctgggatagtaggagttgaatataaactgtggctttttcttataaagcatacctacttttttctcatttatagcttttttacagctctcatttgtgcatttatttactacacttattatgcactctagcacctactatatgtgtcaggcactgtagtaggcactgtgggtgctgtaaaaagtaagacagacaaggacccaatattcatggagtttactgcacctgaaagttgaatgatgaagtaagaaacacatttatagaaaagagaatctttctccactctctgccctcacctcccaaaaagtaatgccctttttgcggtgctttgtccagaggatccttctaaaacaacagaaccaaacagctctctgcttggggaagcttgcatgggttttaactccttacattcaaaaatggtgccagtagtgttcacctacctcccacaccaagtttctgccttctgttttgtcttcttaattggggtctgctcatgctttctcttccttcaagcctcataagaaaggtagggcctttgcattcctgctgagcattgctgccattgttttatcacccttagaatacctcctttatttcatatcattcaaccatttctgatttgtccccatgtatcattgatactgatctctgcccctcctccacccttactgagaatttgggcatctaatacatgaaaattccttatactccttgttctgctgtgatcccagatgattttgatttttgattttttggtttgtcatttgtttgtttgtttgtttgtttgttttgacaacaacctgtcctcagctgaaacctaaaaatgctttgagagacctttgtcctctgttcatttcagctacccacatccactaacactctagatcttgaaaccagtagaacctagaaacatttctgttctgaaatcttaacttcagtgtctgaccatctggccaaaacatccttctttttcttcccagtcactctcttacatttgaacaagagtttttaaacaaattctggaaagaccaattctatgacaatatcaagatctacagacccagattacctcagttggccacttggctttactttctcatatcctcagctagacttcatggttcattttgtgatttcctctcctttgccctcctgcaaccaagccttggtttctctacacctattccaagactgctgaggaaaagtatacaaccatgcagactggagccaagacaaattcattccaactatttatctctctatctatatctatctatctaatctttcatctactcattgctttaactctatcaagacaaattcattccttctatctatttatctatctatctaatcttttgtcaaactgctttaactctaatcactctctttgatttttactctttactttttctccttttctcttgaagtcaaattctgaggcagattatccacactcattggaaacaaataactgcaaatagttactcatctatctctcatttgatctccaaatctgtaaaatctgttttaaacttccaacattttgtgcaattggttctccagagtttagtcaaggcatcattatttctaaaccaatgcgtcattatcatttatggtaccacatgtcttggcccattttgcattgctataaaggaaatacctgaggctgagtgatttattttaaaaagacttttatttggctcacagttctgtaggcttcataggcatggcatgggcatctgtttctggtaaggatctcaggaagcttttattcatggcaaaaggcaaagggggtgcagtcatgtcaaatggagagagtgggagcaagagagataggtggagatgccaggctccttttaacaatcagatctctcaggaacgaatagagaaagagttcatttattactgcaaggcagcatcaagccacttatgaggaatcagacccttgacccaaacacctcccaccaggtccacctccaatgttcaggatcaaatttcaacatgagatttggaagggacaagcatccaaattatacatcaccgctacaacatttgcgcatcaccccccaaaaatctgggttatttgatgtcattcattgattcttctaactctgatggttccatctcaacctctcttcaggagtctccttcctgctcttctttaattaaattcccaattccacattccttaagttctttccttaattcactcttcttttctctatatacataatccctcttttatacccaaaggtccaactcccccttagacactgatgtccccaaatcttatccccaagtcaaaaatctctccagagctgcaaatctgtctgcccgctgggcattccacttgaacattctctaggcatcacaagccctaaatattcaaaactaaatctaccttcttttctttcaaatatgttccccacaaatctgtgtctgatgcatagttggttgctaaacagcctttaactgttcagcctttatctgattagagaagacactgagcttggaatccctgaataacttatccaaacagctcctaattccattcagatctcttagctcttcatttgaagagcttagaacaatttatcatcattaagtattctccttcattattgagaatgctaagtctgagataaacttcattaaatggggtccccaagcttcaactcataggtttagtatcgtctggagctttccccaagtggatacagcaagtcaggagtggagtaggcaataacctgctttgtggattcctgagtcaggcagggtgtgatggcctgtcctgacagcccaccagctctcagagtcttgctattggaactcacaggtgagatttatttggatgtcttctgcaagtgatggaagagtctaatccttggatttagtttattagtttgtttaacctgtcagcattattctgattgtttagtgccagcgtcataggctacaagatgcaaaataggtgaagcggctaataagttaagaaaactctgattaagttccatgaggactcaacaagcattgtacaggttaattgaatttttatagattaattctcctttcccgattctaagaggttgttctctttcaaagccctctgccaaaccggtgatgggagaaattaaaaatcccaaactaaataaattgtccctgcttttatcctggggatcataatgcacaaagcagcaaatatgaggtgtgtagggaagaaatagtaactgagtcttcgggttctgtggacacagcaataggtatacaaggtaaacttctgacctaataataaataatcaatcacactgaggatttattgactctaatggttgaaaaagttttccagaccttaagcaaaattctaagtggtctgtgcttttcatatttgaataaagtcacactgggattgagctgaggctactatatgctaactattatccataaattagaaacagatgtaggtgaaaatatgcattttaaattaatagaagttatttttagggaagttttagatttacagaaaaattgaatggaaaggacagagttgctgtataactgccaacacacagtttccactgttattaatatcttgcattagtgtaatacatttgttacaattgatgaaccaatattgatacatcactaacagatttcaaagaatgtaaaaagacatgtatctaccaatatcatacagattcatacagtaatcatacagaatagtgtcgttgccctaaaattccccctgctctaactactcatcccttcttccccatctctgccacaaaccccggcaaccagtgatgttttcctgtctccatagttttgccttttccagaatgccatagagctggaatcatggagggtatggactttgtagatgggattcttttacttaccttaagcttcctccatttcttttcatggcacatttctttttatacctaaataatatgccattgtatagatatggaaatatgtatttttaacaatagaccatagaatcctcctggatctcagagaccctaaagaagaagttacaccactttcttctctctccaatggggaaggatcatgtagaattcatttactgagggaagactggtttataaatggcaaccacatcagtatactgttgaaaaaattctttctacattctccacctcaattgatgcactatcacaaatttcttccacccaaccacctaaaacctgaagactttaactcctaaatttcttaagtttcattaaatcttatatttcttaaaaaattctcccatttctaactagttcagactctcatcatttctccactaaccactgtgatactcttctatttggtctttctgatttcagctatgccctccttctatctgtattcctcattattgctagagagatctttctgatatgtaaatcttatgtcagtcttctgctaaaatcatttggtgactcttcactccctttgcatgaagttcgagtctttcatcttgcctctccaggtgtatttttggttcctctctgtctcacactttgacctgtgccaacaccatttcttgtgtaacatttttcctgacctctttgactgctttgctctcttttctctttctgaaatgccatcctatgaccccctaatcaacttcacttgaatttggacttagctgacacattccatattacaagatgccttttctgaaattactttttcttttctctcttctgtctaaactgtgttgagtcccctgttctgtgttgcaataaaccttgtccatatctctccttttgaacctcccttatcatgtctttataagattttccaattccatacaggccttctacactacgaaggcagagattcattcaccattaaatttgccacccctggcatagaatctgatatatatataacacagtttacagatactccttaaatgaatgtaagagcagatgtccaaggccaagctgactcttgactggttactgtgtagagctcttgtgcttgagggccctgactttctctgtaaggagaggatcagataagatgattactgttggcccaagccatggtcttaggcagaaggaacctggagtggactacaggatttttggtaatgatccagtgctgtatgctcctacgttcgctgctaatgtctctggactccattccaacacttacagattatttttctctctgttcatcacctggcatataccatattgccccactacccacctctcatcccccctatctcccctgtctccccttgagtacagtcagaatataatccctgtgaagctttcccaataggagactatgagagtcatccctcacctggctcccttggagtcagagctgtgagatctggactttctcatgaaataagaacctctgggccgggcacagtggctcacatctgtaatcctactgctttgggaggctgaggcgggtggatcatatttgagtttaggagttcgaaaccagcctggccaacaggatgaaactctgtctctacaaaaaatacaaaaaaattagctgggtgtggtggcgggctcctgtaatcccagctactcagaaggttgaggcaggagaatcacttgaacctgggaggcggaggttgcagtgagccgaggctgcacaactgcacttcagcctgggtgacagagagagactctgtctcaataaacaaataaataaataaataagtaaataaataaataaataaaagaacccttgacttgaagagggagtttatttgaaaagacttagtgacatcaaactctacatctctgagagtcatgataacaatgcctacctctcacatttcccattcctctcttctctccatctctggctcaggttcctcctattcattctctccttggcaatactgggaagcatccctgctccttttgcttggagtggccatttgcctttctcagtgtttaaggtcaaactagaccagctctgttcacttataaaatatcagacacctttcccctctgtcacttgagtaaagagtagctgcaaggaatgtgggagaggcagaacagagttctgacgtgtttaacctacttctttagtcttttctttagagagtttcagctatcttttcctgaccaagaaatattagctgtcttcttaatgaagattgaggtatcttgagagggttgtctagaaacctactgacaaatgtgactgtaattccttaagacaggactgttttttgagaaagtaccctttcaagtaccatgcaaattagatctagattttctgcttgctgagaaagaagggaactaatatgaattgagtgtctattcggcaccaggcataaagctcagtgatttgcataaatagctatcatttcaaatttttcaacaaccataataataaaatttgccaacatttgttgaactctaattacatgtcaggacctctgttaacagatttacttgaccaatttaatttcagcctcacaaccacacagaatataggtatttttaaattatccttgcttttcagataagaataaaacataaagagaagttaaccaacttgaccacaaaaacataattagtaaagcaagtctcaggtttgttctaggaccaaatgaatctgtgcccagtcttctacataggatgctatgctgatttttgactgcaggagacaggcattgttgttattattattttcagtttacagtccaagaacacagtttgaaaacagagacaaaacaaggttggaaaatcaaccttgtctcatcctcaacacaaggtcttcaactcacactctgatggaatagaaactggaggttctgacccaggatccacgtcctgaagtggggccttgtgaatgaggtgtgggctaagaaaagcactacatcacgctatcccagggacaccccgaaacaatctctccaggttcctctgactccaggctactttgttgttgtgtaaacatcagttatttctattttggtcttgaagtctctactgggagaggggctatcaattcctgccctgccctaatgagctccaggggaggtggtcatgtatatttacaagcgtgtctttcagggtgcacttcttaatcctggtggacaacctaatgtctaaaagtccaactcatgaccaagtgtccctctcacaagaaacttatttatgctgtcagatgtctttatggctcttgtctgacttctcttcagcttctttctaccaagacagtcactctctaggagagccctgatgaggaaagggttaggttcagccgtgttgatgaggcaaggcacagaggagaccacacaacaaaacacatgaaattacagaagcaattttattacttacagattccagggagaagagggctgcagccttcacaggaccaatgggaagtgggggctgagggaatgcctggatgcctgggacacacacttaacaagcagatgaagaataagagagagagcgagaaagatagagagataagagagactcatggatcaaagtcttcactgagatccagagcattacccatgcagatttccctcaggacattctaactggtggatttacagcaagcagtctgagctcagtagagtatgctgctactgggagcactcactgtggcacatattggcagtccatgcagggtgtgggggccagtggggcaggtcaagtagcatgtatctagctgtcctttacggatgtggtcactaggagctggttgtataaggcacatatctaaatcgatcacactgaggaactgggagcaggtagaaaactggaaactgcgtcaagggtgactgaaattctgcttctggtacgaaaaacttaaatttatattgaaaatggatgccaaggcaacataaagttataagaattcactacatttatttattcacagtacatgtaactctagagaaggaacaaagaaactggtgtatccatcccagaacagtatcttagtattctaaaactggttgaatcacagaaaaatacattggattttaatgcaatttccactctggtgtttccacttacattaagggattgaatttccaaggctcacccaggtgaggcagactaatgtccccaggagaagtcacttgtcagacaaataggatatcccaggtggccaaatataccttgattgcagactcataaaccgaaggattaagcgtacctcatagaatgagggaaaagatctccctcaatggttctttttctgttaaaatacatggcactattgtaagaactcaataaacgtctgctaagaactcaataggtatctattgtggttataaagatgaaaaattgagcaaagccaaattgggagtaaactttgggtaaccagagatagacattgtcagagtttttggtcataagggagacatgtagactctttttaatatggcacttgggctcataaaagatctggacagtgaggcatgaagaaatgaattgctgactaaagtagtgggttttattgaataccaactgatcttatccgccatccttatgcataaactgtagagtaaaatattcaatgagatcttcatctttgtagagaattccaaactatcttgagtgtgacaaaccaagatgacaaggaaagactatagtggggttttgtacaaaatttgtgggagtggacataatagtgacaaggggaattctgtgtgtacagaggcaaagcagtgcatttcaggttactagtcatagggattgaagggaagaaaatgtcaagtgattataaaacaaaacttgaatatttaattgggaaaaaagtttaaaaattgttataggacacacaaatatatatatacacacacacacacaaacacatctccgtgagtatatatgcatatatgtagatacgtgtgtgtgtatatatatacatatatatacacatatatatacatatatacatatatacatacatatacatatatacatatatatacacatatatatatatatatatttctgcatgtatacaggtaaattcaggtgcacagatgcagatttgatcctgatcctagagtttgtgttactacctttattaatctgtgcatggtatggtatcttttcaatgttttattatattctacactctttttgctttctcgatcttaccccagtagctacccacagttaatttacattattgcttacatagatattattttatataaagaattctgactattccacacatgactttttctgaaacctaccaatgttgacatctctctatccacctgtcaatataggttaacatagatcaatctatagatagatagaaatttagaacatttctttgggagagtattcagccttaagaaacaaggcacttggccgggtgcggtggattatgcctgtaatcccagcactttgggaggctgaggcaggtggatcacgaggtcagaagatcgagaccatcctggctaacacggtgaaaccccatatctactaaaaatacaaaaaaattagctgggcatggtggcgggcacctgtagtcccagctacttgggaggctcaggcaggagaatggcgtgaacccgggaggcagagcttgcagtgagctgagatcgcaccactgcactccagcctgggcaacagagcgagacaccatttcaaaaaaaaaaaaaaaaaggcaatcttgtcttttacgacaacatggattaaacccataggacactatgttaagtcaaacacatcaggcacaggaagataatcacctttttatctcacttaactgcagaatctaaagaaattgaactcactcaagcaaagtaaaatggtactaagggattgagggattcttggtcaaaaggcagaacatttcagttagacaggaggagtaagttcaaaggatctattgtacatcatgacaactacagttaagaacaatatattatatatttgaaaattactaaatagatgttgtgttgtcacaaaaaatgtatgtaaataatgcatatactaattagtttgatttagacatttcaaaatgtatacatatatcaaagcatgttgtgtaccataaatacacataatttttgttaattaaaaaataaaattaaaaaaggcaatttagaacatttcttttgactgatgaataacactccatccttctaatataacacacttttggtggacacaggctgttttaaattttaggtattgcagacaatgctgaaagcaatatttttgccccatttatgcatacctctgggtatctgtgtgagaatttttccatatctagtatttgaaatgtgcatatttaattttattacatacttccaaatggctctccagaataactataatagttttcaagtccagtgttttcaacattctcaccagaacctgttttcatctgactttaatttttgccaggcaaatggctataagatgatgtattaacattattttgaattgcaggtttttgataactaatgagataagacatctctacatgtgcattagccattctggttttgccttttgtggaatcccattcatagtttcctcagctttctgttgagattactatgtttcttttgctgatttgtaggcataagatatactctagatattaatccttttttagtcatacatatgataatttcttctcccactccataactatttaatacttaataattttttggttttctaacatttattttattttttaaactgacacataataattgtacatatttatggttacacagtgatagtttgatacatataatgtatagggatcagatcagggtaatgagcatatccatcatctcaaatgtcgatcacttctttgtgctgggaatgttcgacatcctccttctagctatttgaaattatatcagatattattgttatctatagtcttcctacagtgctatagagcaccggaacttactcctccgatctagctgtaatttcgtatcctttaacaaatctatccttccttttcctctacctttagtatcctctattctactttttacttctatgagatcaacttttttagcttccacatatgagtgagaacatgtggtgtttaactttctgttccttgcttatttcacataacataatgtcctccagcaatgtccatgttgctgtgaatgacaggattttattctttttatggctgaatagtattctattgtgtatatatatcaccttttctttacccatctgttgttggacacctaggttgatttcctattttaactattgtaaattaggctgcaataagcatgggggtacagaagtctcttcaatatattgattttctttcctctggatacatgcccagtagtgggattgctgaagcatatggtagttctatttgtagaatttgaggaacctccatactgttcttcatcatgacttaactagtttaaattcctatgaacagtgtatgagtttgattttctccataacctcaccaacatttgttttttttctttctgataatagccatcctaactggtgtaaaatgacacttcactgtgattttcattttcatttctctgatgattaatgatgttgagcatttttttgatatatttattggccatatggatgtcttcttttgagaaatgtctattcagatgatttgtccatttttatttatttcgagattgagttttgctcttgttgcccaggctgcagtacagtggcatgatctcggctcactgcaagctcagcttcccaggttcaagtgattctcctgcctcagccttctgagtacctgggattacaggtgcccatcaccatgcctggctaattttttctattttctgcagagacagggtttcatcatgttggccaggctagtctcaaactcctgacctcaggtgatccacccacctcagccccccaaatttctgggattacagtcatgagccacagcgcccagcccatttgtccatttttaaattggattatttgtttttttgctgttgagatgtttgagcttcttgtatattctggatattaacacaaatactttctcccattttgtagattgtcttttcactctgtggattgtttcctttgcagtgcagaagatttttagcttgatatattcccatttgtttatttttgcttttgttccctgtgctttcgagctcttattcataaagccttttttcagaccaatgtccggaagcatttcccctgttttgtcttctagaagttttatagtttcaggtcatacatttaggtctttgatccattttgacctggtttttgtatagggtgagaggtgggagtctggtttcattctcctgcatatggataaccagttaccacctaattttgacattttcaaatccactaaatgtttcattttatggttttttttttttttgctcttgaggttttgttcaagaaattattttccttctctattgcatattttcttcaaatgattttgaagttttacctttaatatttttatttttaatctaccaggaaattatttttatttactctttcagatacaatctaattttagttttctccatattgaaaacagccttctggatcttgcctatcaatctccttcctgctgccctatattgtctcctttatcaaacaggaagttttatatatatgagtatatttttgtattctccagactgttctcttggtctatttctctctctgtgacccatttctacactgttttaattaccttggctttgcaatatgttttaacatatcacaactttttttgagaatttttttcttctcttcttgaatctttgcttttttatgtgcattttataatcatattgtgtgattccacctacccactccctcaagtttcaactggagttgtactacatatttggattaacttgggaagaactgatagatttttaatattaaatcctcagtcaaaaaacaaaattacacaaatttagtttaaaaatctcaattggctttattacaattctagaattgggtatcagttcattttgtaaaataaaaagtgtttcaatgaatccagcagaggagtatggctttatagacagaaaaaggactgaagaatgcagaaacaaagaacaaaaagcagattgattatttcaaagttataatactttccttgtaaggcaggaacaaggagaaagaacaatagaaaaataactgattggttaacatcaggttacttcaggctaccatatttgtgtaagatgagagaattttgttatcatacagattgatgatttaaactggtctaattaggagattggctatctctggctcctgatttctctaaaggtctgataacaacttagttttccttagaaactttagcatgtgtaattccactttgatttttagtttggtctgctggtgcctagtacagaagcttgatccaaaacaatggcccactataatttttaacactcatttccacaaatctggtacatttctcctttgcttcagttctcttctgtccttcaataacactttataattttctccataaaatttctcacatttttattagtcaattgctttatactttgcatttttattttcataaatgctatcttcttttaggtacattttctaatcagtaattgccagtataaagatactattgatttatttatgttggtattttacttttcatcattttatctaatgtatccaatagcctgtttattcttttgagttttctgtataaaggatcataatatatgcaaattacaggagttttatctcttattttcaagtacttagactatgttgcactttgttgggggtttcactgtattagtcggaacttccaatattatgcttaagagcaatggtgataataaaatatttggtatattcctaacttcgacaaaatgtttctaagatttcttcattatggaggtttttgaaaatatttatagtttggacagttcacttttaaatttttcattaagacctttcatttttaaattgaacctaagtgctgaattattttatatgcttttcctacatacatttaaaccactcttatgtttcttccattaatgtcactggttatcacgtaacctcagattattaacagactcttcctcttctcaagactactgaagaaatcttgtctttgcccatgcacttattgggtgttgttgtccatataggaactaacaggtgaggagaaggatttaaagaaacttgggtgctgcaaccaatttttagaaaactaaaaggatttttttctctcgttaaagatataaatcaatgcagaattgagaaactgagatagttaaagccagcatagcctggagaacttgaagtaaattagagaaagtggaagagagactgggggcagatattctataatgagtaagacttccagaaaaaaatatttttaagattggtgaatgttactaatgtctttttctgagtaactgaataacataattgttcttcattttctctggttcttagacttgtgtatttctttagagtggccatctgtgctcagattgggccacagagtggtgaacattaggtgatttacacctcagcttggaaatcctaaattttcatacttgtgaaatttgaggaataaagaaagcacaggaattataacttgcatatgttgattaactaaaaaagcccaacagtaggaagctctagtcaccagtgccttaagtatgactctgtccaaattacttagttggtgattggccgggcgctgtggctcacgcctgtaatcccagcactttgggaggccgaggcgggcggatcacgaggtcaggagatcgagaccattctggctaacacggtgaagccccgtctctactaaaaatacaaaaaattagcccggcgtgatggcgggcgccagtagtcccagctactcgggaggctgaggcaggagaatggcgtgaacccgggaagcggagcttgcagtgagccgagaccgcaccactgcactccagcctgggcgacagggctagactccgtctcaaaaaaaaaaaaaaaaaaaaaagaggtgattaacttaaatgatttctaaggacttgtttggtgctaatgctctacaatcacctgtcactattggtcagaatgtgaaatagtaacaaaagatgtccactcactgtacttaaaagatagtgcgtcccccggtgacagtcgcttaaaagtcagcaacttcccacatccctaatcttcaattcagagttgaccctttctcccatcttgaggtgctcagtgatctcatactattctactactgctacaaacccccactcggtgctccccaattctgcccacctagatagacccacattgcaggcatcacaccatccttcctctagcaaagctgatctattggttgcctcatttgcagaagcagtcttcagacctttaaaatgtggaattaatgtggtcagtcttttcctttggaggtagttacacatgcaatttatttatgcgttttctcctaagggcagtcttatttttgtttttgttttttatttgaaacagagtcttcctctgtcacccaggctggagtacagtgggacaatcatggctcactgtaaccttgaattcctgctcaacagatccttctgcttttcagcctcttgagtagctgggacaacaggcacatgctaccatgcatggctgtttaaaaaaaaaaaaattgtagagacagggtcttgtcaccatgttgcccaggctgcactaaaactcctggcctcaagcgatcttcctacctcagcctctcaaagtgctgggattataaacatgagctactatgcctgacctttacccaggcataaggttttaactgaaatgtataacattagtcagtagaaagaggtactgatagaaatgtgtagttggccagtcattcttctgcagtttccaataacatagtcaatgtctttttgcttacttgtgaagtgaactgtgtatactttcattcatatgtaaaatcttcttcttgacccttcatagtgtgtatactctgtctttcctaaccacgccgttattctcatttttcattcattcatttagcaagtatttattgagtactttgtgtgtcagaaattatgacaggcacctgttaggtattagattgtgtttaaatgcaaaatcaaacaaaacttggagtaagaaaaatattcctcaaccaggtttgagagatccctatttaaaaattattccaggataggggctaaggtctatgcattgtagatgaaacctttggtaatacaggtgttccacacccagcttaaataatactcttgaccttcattcacagaacaaaatatacagctggatgtttgtcacaattctaatgtccctgcaaagatgagatgcatgaatcacacagcaatctcatcaaaaaggtaagaaaacaagggtatgttttatcctgatggattttactagcttatatccaatcacttttattgtttcatcttcctttccaagaaatgagttcctttttttctcctttcaaaaactagctggctgcttaacgccccgtatacagctagtattaaactttatctctttgcaattagtgtttgtgcacagagcaattaattagattacagtattggtcacgtttgtatctcacaagaaactaaaggaccaaaatgctgatgtctagagaaagaatcacttcaatgactttgattaatctgctataaaacatcctcaagccctccaacagatgtaatactttatcccttggctcccgtttgcattttatagttggagttgggaacagacaggcttcatatgtgtgtaattgcttctgagcagagggactagtgtaataatttggactgaactctccagtttatggtttcagaactttctccaaacacatcagtctggtcacataccaccattaaaatatgatgtgtatatgagaatcagagcacttgctagcagacctataacattaatatttaagattaattgaacatttactgtatgtcaagaactatgctatgtagtttgcatgtattatctcaccataataatactggtatagttactatttcttttaggtagttgtggaaattaggtgcagaggggcaaagcaatttagctagattctcagctaggaagtagcagagctggagttcaaaatcaagcagactgactccagagctcatgttcttgacaaacttttttactgacttccaatacaccaccaaacaggcctgcagtaccacattagctaatgtggtcccaagagctcaactcaaggaagcagagagaatggccaagggactctgacagaaacatgcaggtctgtcttcttcctggggtcatgaggaagagggtagcattgctctgaggcctgcccatagagcccagcatggcaggtccttcagtctcatcagggattggggtgtgtgtgtttgggggtaagaggggagaagtgcacaaagagaaactgtagaattcttggaaaggaactctcctcatatgaccgcagggagatgggcaagacccggtgtgagaaccaaatgcagcgcttgttcagagcctctctcacatggggactgagaggtcctgatgacaacaaggccttcctaggtgtgctctttgctgagggatggggcatccttctgtgctgttagtcatttttcctaactcactcacctaaggtgaggaatcatttttcctttctagaggtctttccttctgcttcaggccctctagactcagccactcctgtctccctcactattgtcagatgtctccagactctaaccaccagtatttcaggcccaagggatctcagacttgtcattctctttagtactgcagcattccccagaggagagaaccagaaatcccgtagaaaatgcagaagtagaaggtatctcatagaagtgatacctaggagttcttgccacacaaacaggactgttggcatagaagttctcgttatgttgggtccagatatattttaggtccatggtatctggaggctaatgtaaacaacctctcaggaagaatatgcgtgggcctaattgtgcacaattttaaacagcaataaaaaaaattctctggggtggagggtggggtgcagtgcaccgttatattgaggatccagtagtaataaggctcagagaatagagaccccaatgaatggctccaggtctagaataattttaggcatctttcctctcaggggcatggaccaaagtcttgttttggtctacatattctattgaccaattttcattttaacatttgttccagagatagataggaattgttccttggggccccattttggctcagtgtgatcagtttatcttgcactctgctatgctagagtaggatgtccataccacagcctaaaaaagagtttcaaattctttccctgagaaaggctacactgtgtttcctccagacacttcatttactttctgatacccaggtatgtgaatactgttggtagtgccatgaagtcatcatttatgggcagacttcttgcactgatcctttaatgcacaaaggttataataggctcaaaggcacattttggaaaatggaaatgaattagggcttttgcttctagcctcactatgaacctcagagaaaaacaaaaggatgaatcacttccctaagttactatttgggtgtaataggtgcaccttctctctctagggctctccttccctcttgttttctctcttcttcttcctctctttttcttctgaccttcaatggtgattatgatttttatttgataagttggccccaccattcttatagtctatttatttcttgacttatttgactgaaaaaattgttaatagatttattgagatataatttatgcagcttacaacttattcatttaaagtaaataattcaatagtttccatatagttacagagctgtacaaccattaccactatcaatattagaacattttcattacaaccaaatggaatcctgtatccattagcagtcagttatttctcctcatctttatccagccataagcaatcactaagctacttgtctgttcctatgcatttgcccagttaagatctttcataaaaatggaatcttacaatgcatggtcttttgcgacaggcttttatttactcagcatagtaaaatccattcaagttttaagatatatccatatttcattcatttttatggtgtaataatattctcttttatgtcttttatggatagagcacatttgatttatttattaaacatttggcagaaatttgagttctttacacatttttgctactatggatagtgctactatgaatatccacgcacaagtttttgtatggacctacgttttcatttctttagtgtatatacataggagtgaaatttttgggtactgtgataactccatgtttaaccttttgaggaactgtcaaactattttcccaattcacttcatcattttaaattcccaccagcaattcataaggattctaatatctctatattttaccaccacgttattatctgtctttttaattatagccatatattttcactgatgatgtcttttcaaggacaaaagattttaatttttataaagtccaatttatctgtcacttgtgcattttttggtgttttatccaagaagattactcccaagttttcctaaaagagtttcataattttaggttttacatttaagtttatgagtatttttgtgtttggtgtgaggaaggtgtccaaattcatgcttttgtatgtggatagatatcaggatgtcccagcaccatttattgaaaatataattatttccccattgaattgtattgacacctttgttaaaatccaattaaccatatatgtaatggtttatttctggaatcccagttctgtttcaatgatctttgtgtctcttcttatgcctgtaccacactacttttgcagcaagttttgaaactggaaggagtgagtcctccagcttttctcttattcaagactgttttggctattctgacatcccagcatttccacatgaattttaggattttcttgtcaatttcttccgaaatggaagctaagattgtgttgaatctgtagatcagtttgaataaattggcatcttaaaatattaggggtttcaatccataagcacaggctttctttccactcatttaaatcttctttagtattttcaacaagtttttatagttttcagagtataagctttatatttcttttgttaaatttattcctaaacattttactatttttaatataattataaattgaattgttttcttaattttattttggatttttcatctctagtataaagaaatacaactgatatttgtatatcctgtaaacttgctaaattcatttattatccctaatagttctcttgtgaatttcataagatttttctatatacgagatcatgtcacctgtatatacagacaattttacttattttcaaatttgaatgctatttttttccatctaattgcccttattagaaccttcactagtatgctaaatggaattgaaaaaagcagacgttcatgtcttgttcctgatcttaaggggaaagcattcagtctttgatctttaagtattatgttacatgtagggtttccatagacaccctttattatgatgaaaaagctaccttctattcctggtttgttgagtgttgttgtggtggtggttttatcaataatgggcattgggtttgtaaaatgctcttcctgcatctattgggatatttatgtggctattgttctttgttctactgatgtggtgcattccataaaatgattttcacaggttaaacaaatctcgcattattgggataaatccgacttgattatggtatatgtttcttttcatatggttagattcagtttgctactcttttattgaggacttttgcatcatcattcataacaggtagtggtccatagttttattttcttgtaatatctttgtctgaatttagtatcagggtaacactggcctcatagattgggttgggttatttgatttcttgcatggactctgctcagccagaatataagctcatttgagtaaaatcaaagccaaagacttacatactagtaactcgataaatgtgggatgaactgaattgatttggtggactcctttcatcagagtgttctaccaagtcataaggaaatggcctattttctttctttctcaaattctacctgggttctcactccaaaatttatgaaacaatgaatatcccttatttcatatatttggttggaaatagagcaggctgatcatttgttttgccttcattcaaattccagcccatctgcaaatttatcaaggcctataaaagtcttaaattttgacaaatattttgacctttttatgattttatgttaatacattaatatagtaagtattgaaaaatgaatgaaaaaacattggaataaacacatttatcaatatggacataattttaacagatgaaatttgttaatttttaaattaaatatctacatattaatgaaaaattctgcagcattacaaacaagattagagtaaaatatatgattgttgcccattcaaaaatatttcttggtcacctatcatgcttaaacaaataaaagataaatgttaggttgaagttatttgtctatatagggacttgagataattattatgatatgtttttgtaaaaaaaattctaccaaatataaatacttcgattgtattgattttaacatgtatagatagaatgttatgcacacatacataatgcatgcatatataatgcatatatacccacatgtattgtcatgtccagatattggacttaagaatggtgatttagttatttttcttcatcgttgttcttcttggtgctataattcaaatgtaatccagtcacaaaggtgaaaacagtagaatttagatggggaaaagaaaaaagaagaaaaaaatacattttatattgaatatgcattgacttgttcttactccagggtggctattactccactgtttaaagcttaccaggttccagttcactttgaattaagaaacattgattgatgttgttggtttccaagcactggctccactctctgatatgaagagatgcatatatcattattatgtgcttatatcattaaggtgctcactattggatgggaagatgtgtaccctatatcctacaggaaattgtgaaggcctaaggaatattctaaagtaaggtttatcaaactatggcttacagccaaatctagcctgctgcctgtttttataaatacaattttattggagcaaagtcatcctcattcattttattctctacagctgctttcttgctacaacagagtggattagtcatggtagaaattgtatgtcctgcaaagcctaaaatgtttacgttctggccgtttacagaacaagttaccaactccttttccaagaagtctgctacttcttcatattcatctgaaggaataaagaaaatgctaacctcttcgtttaaactatgctaatatcaactgactactactgaaatacagagctaatagtcacttagaaattaggaaagattttctggtgacggctgaggctagtactaaagataaggaaaggactctattcagtaaacataagagatctttctccaagtagagaggaagacccaggtaaaagtagatgtagagattaacaaacatactactcacctctctggatcaagacaaaaattatgtggacatttttcaaaacccattatacactggcagaagagttctgcttcatgcagtccagacttcagagatccagacttcttgcacctgttgctctctcctccaggtcctcagcaccctactgattcagctggcagaaaggaaagagtatgagtgcattacctaaggatggctcacattatgcccattcattccattggccaaacacacctgattgcaagggagctagaacatgaaggctagaactctgtcatattgccatatttcttcacctttcttttcagtctcattctgaagaccttaggactcaggctaaagccacatttttactgcctcctctgaatatcttcatccacagcaacctcctctccccttacttactgtaaacttaatgcaggtaatttatttaaaaaaaaaagcagtgactgagctgcctttatatattagggaagtaagataaatcaccaaaaatgagaattagttttttatgtttcaaacaaattgatgattgtcttatggtagtatacataacaaccctatcctcccattttttcccaggaatttctggaaggtaagaataaaacacaatggacactaaaacttttctgcccacgaaagtaagaggcatttgagaattgttcactttatcttatgaggcataggagaagagaatcctggaaaaagcaagaagcaggaagataagaggcaaagaagaagagagccccacccactggggcaagctggggccccaggtattggttggggaatttcaggcaattgtgttgtttgacattgatcttgatttatttttcttcccagccctagcactacctctcagtatcttcatatccttcagtaagtatttatcagataaacattttttgagtgatatatttttagtcaatgaagggagaaagagtagcttactgtgatgaaaattgagccagtcttgggagctgagggccaaaatcaggagatgacaacagcagagaccaggcagcttcatcaatggctgatgcaaagaaaatctcccttctttttgcccatctcaagcatctttgcggagcacacagcagacttctcatagtacctacctttacgtttcaattttttttttttttttttttttttaccaagatcttgaagaaaatggcagtttcagaaagtggaggacttgtgacaggggttcctgctgtgatctgtgttagctttccatgggacttaccccacataccaaatgccccttggagggcataactggagacttggagtttattgtacttctaaccaacctaggcacagggcgtattatagcttcttcctagtacttaatgatgttgctctaaaaaaaattctagtttgccataacgtaaagcccagggctgagaagagtctacctgaaagacagaaagtaaagttctgcctcttgctgctgctgaactcttgcactcaaagtaggagacagccttgtagatgttggaatccaccggcaagacctacagaccagcccatgtgtgagatgatcacaggctttgcgcagaggaactgtgagcatggatcagaatctagagcagaaagggaggtcaggtcaggcctatggtagcctttttcagatgaaagagcaccagcctgacgaatccataagaacaggaacaacatgaaagtactgagggcccaaatcaccaattttgttctctgggaataataaagacaacctgaagtaccaaaagtctaggcaagttataacagttaaagaattacaattctattaaaacacaccaaagactaactgtgtgtttaacttgaatgtaacttttcttcactgattctaaaagtatcctaggatcttagagtatctcaaggtcataattgtagataatactgtaatggatttggctactgttattacgtaatcacaactacctttgttaagtacttactattatattttccagaaaccatcttaaagggtgtagatgttttaccttatttaataatcacaccaactttttgagttagatgttaatgagattattcccatttttcagaacaataactaaggcttaaagaggtcaagcaactttgttggcaaaaccaggatttgttccagtgtctgatgactctgaaacaattgctcttaactagtctatcacctcttacgtagggcattggctccaaatgcaagaatcttaaagttcatccacagagacaagactcacatagaaaccaatacgtatgaaagtaatttggggctgagttgtgtgaaattttattggttctatagcagctgagagaagaaataaatgtgttagctgaagaaggctagaaatagtttatgaaaaagttggatataagctggctgctaagaattggctaggggttctctttgctgagtgtctgatgagtgtctttgacagtaactccttcatagatgctttcttatgatgtaccatttaattttgatgaaggtcctgtgaaataagcagagcagattttatgatcttagtgttacacagacaagaagcgcaaggacaggaagggacattgactgtctctggctaccttcgtgagttagagagcagagacaaggtgcaggtctttggagtcaacctcacctagttcctgccaccactgtgtttgcacacacacacacacacacacacacaaatgcacatgagcacatatacacaaacacacacattctcagagcagtacatgcatgggaaatcctacgtttcagtcctagagtcccacaaaccacaaggctttaaacagacatagaaatcatcccagcagacatatgatccccaactatgccactactgagcatttgaagtccatgcctttagtctttttatttataaaaattacagtgatcacatcattggagatgaaaggacaactgtgatcacagaaactaattagggaacaattaataattcaaaactgtaataaagctgttttataggcaagagctatcctggaaatgatcccccagtccgagattaccctcccgaaggagatgtcttcaaaggaactaagataattgtcatcaacaagggctggaagactctgcttgagaagtttcctagcagtaaatgaatagtctcttaggtgatatagactgcggggggctgccacattcgtttcattgtcttgccattgtcttatggagacactgacctggctttgcattatctagatatctttaatagtggtgttccatttttatacatccgtatatatatgctattagcaaggaaccatttggaaaggatttttcctgaatactttctcacatcagttacttacgggaaagtggattggattttgcattgtcaattttccaaaactctcacattagaaaatactcttagcccagatatttctttccatatgatacatctgctggttgatctgactagtaaagagaaaggttaggtgtggggactcaggctatcttgaaagacacagagcatattctcatccacttctatgacaatgtttttcaaggtatttttatttccattgctccattcaattctcatggtcccttgagaggttgggagggaagacacatttattgtcatttgacaaatggggactgggactaaaataggttcaggacttactcagggtaaaattaagtgaaatggtgaagctgaacttgaacttggtgtttgtctcccagtcaaacggtctttccacctcaccaacctcagctcgcccatttccctgtggctttcactagtgaggcattactcttatggtttgcgagagaagtttccaagtttctatgcctggttatttccctgaaagtatcttctatctctcttaacatctttcatcacaggcattggggtattttcccatgctaggaataagaggagcagtgtagaggataaacaggatttggtgctgtcctgtcccaccctcaaatttcaaatccccagtatgtttaggctcttccatgtttcatgttcccctgccaaacctgatcacagagcaggatctaacatcagccactccctagtggtagagtaagttattccccttctcagaaatattcacattctaaagcagattcctcacataggaagatatgactttgtctaaagagtcaagaaatactagccattagttatgctttggcctatgtattaaagatgagaaaagtgcatggataatttttcctaaaattacactatacatgaggaaatccaagttcaaagagtctacgtaacttgcacaaggttatgaagctggtaataagagcttataacagtaagtttagaagataaaggtaaataaggtgcatagctaggtgcagcagacactgtgggtcccatactcaacatccatttatactttcttcaaaaaaaaatagaacaaagtaaaacaaaacaaacaaaaaaaacagatccacaatttttttctggcatgttaccttcttcatgttgccacaagtttcaagggagactgacctcattcagaattctgttcaattgaatctgttggttcttccctttttagtgattggtgcaggattagggatgtaatatacaataggattttgtctgatgatgttcctgggaaagtcttttgggtatagggaggtgggagtttctcaaagagtttttttctcactcttaaaggaagataacaggaagagttttgttttcttttcttcttcttacctatggccattgttatatctggtcaggatgcctggaacaatgggaattatcttgttaacaccctaaaggaaaaatcagcatttaagaaggaaagaaccttcagaaatacagagaagaggaaagtaagccttcaacagtgtgtacctgaagctgccatcttttggatttcttgttacagaagagagaaaattttcttgttgcttaagccaattgagtccatgcattcagtcctgaaaatgaagccctcttaaacagtgtcctgctcttttataaaattcttttgatggcaagacataacataatgacgcttggatagatgaaaggcagactattttgttacttgcagctctgaatgagagaaggctgccaggcagggccacataggggcacccacctggaggcagggtagcagcttgttggagtatgcatggcaagcagggtgtggttaggtttcaaaggctccctttggattggctaatttgagtaatttctggggcataagtgctgtcctagttgtctggtaccaggctccagggcatgggggctgaggcatagtggccctggagtgggaggtgtgtgagaatcccataagaaaggtggtttgggtgtggacttaaccacctgctcaagaagggaatttgactaatctttagccagtacttcaaaacaggctagtaagtcaagacaggacagttaaaaataaaaataaatattacatccagtcaatcaaaaggagaagcagctgccattgtttgctattagcctctggataagcttcccaggaaactgagcatttcttttctatgcccccaggaactgtgggcagtcccagtaggtccctgaaggtcacaggcccagagtgcacacacacccactacacactacacacacacacacacgtacacacactacacatgtgtcagtcacttttcaggaaataatcttgaatggttcgtgcccagaagccaccacttcctgtccattcctaagcatagcaggaggcagcatgaagcaaaaccgtatttaacactaccagaaatgaagatgcaacctgtgaccgcagtgcctccaaataaagaaatagggccaggttcggcagagtatggtattgctgataaaacggagctacataaatccaccacccttcaataagtctcaaatccccggctttctgaagctgctttacaaagctatcttctgaaacgcaaaggatggtctcatttttattggaagattaagataagagataggttcaaaacctcctaaaatctcccccaggtgcagacacataggagagagagtgtatcaaaaaagaagggcactgaactatgagaaataggaataggtatatcaatggggggaaaaccaagtttgatttatccccaaagcttcctaaggctcagatcttataggcgatgggattacctttcaaaccattttaaagatgtattctgttagaatgattgttcaaattccgcctgcctgaaagcaaagagagagacgagaaaggctgcaaactgtctacagggattccaagagttcgtacaaaaataagaatgtcattgttttcattgttttcttcaaatagcatttcgggatttcttcaaatagcatttcgggaccctatatgctaaacattaaggcaattaagctcctttctccaagtggcttataaaacaagatagtcactgtcccaggtaaaatcaatcaggaaaaatgtattgaatgcagtgtccccagtgcattgtgaaatgatagcaatggaacaatgctgcccagcacactctgtggccaggtcactgtggggacgggggatcagtagttatagcagcatcaccttctccatccaggcagcctccccagaatctcaggttgccctctgggttctttcattgcaccttgttcttgtttcatcacaacacttatcatactgctgaccattgcctcttggcttctctgcaggcactcagtaaaatgttctaaaccagtggcattttggggaggtgtgtctctctaccaaactttgatcatcatatttttgtgacttgcatgtttaggaatgtgggtgtgtgaaatgtttagagagaccagtacctaactttgtataagagtcaattcaagagggtttagagtcagtgtatgcctagaggtggacgtttatgatgataaaacagaataaagctgttgggtttttgtagagactaaacacaggaacttggttacatcagcatttatttgttctttcattagttcatcacccattcattcatcacttattgagcatgtattgagcatgattttaccttagtggactacaaaatctatcaatgtctgccttgacattgaacaaataataatgaaggtgttgagggatgtgaaaaggaaaaaatgactaaagcgctaagggaacatcatattcatgaatgcagaatatcactaaacaaacaagcaaaaaaaaaaaaaaccagacatctagagataagagtaggggattggaagaaaaatattcaaaagtaatagcaggttctaaacattttaagaagcagtcaagactgtttgggcttattttaaaagaggatataaattcctagaatccactctttatacaacctaggttttttttaaatctattttctttctcctttaaattcaggaaaagttacaaaggaatatttcaggagccccttaaatacttgtctttcttgggccataggaatgggctagtcatttataacatgatttttaaattgaggtacaaaaattagacatgtttgacgctggttaggagttttctaaagtgactctcacatagatctctgcaaaatgaatgaacaagctttaatacagctcagttatatgaaaagctgtacactataagagatctagaaaactagagcttcaagttgtgtttttaaaaagcccttaaacttaattgaaaaaccaagtgtagaatacaaaattgcaacaaggtccatggtgatcctatgacatcatgatctcaaaggccttcatggagaggtacaggcataatcaattgaggggtctcctaaccacatagtggggaggctggtctcctagaggagaagagcattggatctggtggcctgggctcccatctggctcaagaagatgttaactgtgtaatttcaacacaacaacttctcttcttggatcttggttttctagatgataaaatgcctgtaataacagctttcctgcatacctctccagggaatttcacatgattcttatacttgggtcaggacatcaatttcagggaagaaatataactctactatctttggtagcctgtcttagattctgtcattttcagaaacattgtctaatgcataacatgtatggaatacttttaaaaagtaacgctggtgccagtattttatattattggtgtctcttagatggagaagagtgacgataaatcttgcttgagtattattttgcccgaagcataaactttggaattaaatcagttgccataacccttggatccaagaggtataatggctaaatttcttcagaattgatggcagactaacaattcatatttgctcaggaatacaggattgagcctgaatactggtcttcattctcctgttcacctgtgagactaaggctattgaaaaatgaaagaaaaatttaatttcattagatatccaacatacttaagctcagctggtttcaactttatggtcataacaaaggattctgctattgccttggggctgctgatcatttgtcaaggctaccaggtctcaacaggcaccaacagataatgctaaaagggacactaggtggcattatatggaagtaccagggaaaggactcctgcacctcatatcaaaaatctcctcctcactagtctgtaaatggcctcaaagtggttaaagtattttctcctgctaatatgtgcacatttcacctggatgcagaaggggcagggggatggcaagctgcctccctgccattaacattcacacaattctgattggcacagtgtctagccatctccttggaaagactctgtgaaatcagaagactagtaggcaaaggtagggtgtggaggaatgagtctatgtcacaaagatgccctgggcatggggttgcgggggtgagggaagaaaggcctaaggaaaccacttcttgggagtccaggcagcaggatgaaagagagaagagttagaagggaagcgaagtaaaaaatctccatcagaatgttatgggggctgataggcccactatgtatctccttaaattagatccagagtaggccttaaaagatccctcattgttcagaagagagcacaatatacaaatacctcataaaaggtaaaggtggaagacaatggtacagggagaaaaatgtaagcctgtaggatctcagagaagggaaggagaggaagcatgttttcaaggagcaaaagagagagagcatctgggaagactgtggaagagcatacagaagcataagaaggagtttgtaagctagagaagaaagttgaaggcagtagaattgagaaatgactaagatattcataacagattgtcaagtttcaaaactggctccttgtctggctagacatatgaatttggggatcatatatctgcagcttaatttcctcatttataagatgagtattcacatttgctattgcagagatgattttaaggacctaggaggtattaagggctggtagtgtgttagcttttatgatgttgatcatgatgatgatgaggatgataacgaaaaacactattcaatgaggcatccatgaaggtagagtgtggtttgagtacagcatgttaggaagatataaaagggagaagaggttggaaagaaagtcctattacaatgggcctgtcctagttttctggggctgccaaaacaaattaccacaaattggatgtcttaaaacacataaattgattctctcacagttctggtgactggaagtcggaaatcaacgtgctggcagggccaagctccctccagaggctcaagggatgtttctgacccttgccttttcctaccactttgtgcttgctgataattccttggcttgtgacaacataattttaatctctgcctctgtcttcacatggcattgttccctctgggtgtctgtgtctatgtgtccaaactttctctacttatgaggacactagttatgctgagtttacagcctaccttaatccagcatgaactcatcttaacttgtttacatatgcaaagaccctatttccaaataaggtcacaataacaggttttgggtgggcttgaaatttggaaggacactattcagcccagtacagtgcctgaatgttcagttaaacagttaaggcctcaaatagcagggccactgcttcctgccttgtatccttttccggagcacagttgttctgttcctagaaacaacatagatgggcatcatgcttactatctcaaccccgggaacaagtatgtggatatttacctgccagctgtaaataactctaatgtggaagggaatgatgtagaatacaaattacttgtctaacttgtgatcaggtggcagggaacagaaaggtatgagcagagggatcattagtgagtaacgcttgccttgggaagcctggacataggccacatttacctacggtggcatcccctacacttggcagatatttcatctgcacacctacactggtgtgcagtgggccctgaacttctgacaggatgcccagtatctgtcctgattaccattccccccaagattctggatctctgctatcctcacgaattccaggcccttcacttgtagtagcatgaggcatttccttcctggaggatgtctctgtgttctgatgagagacacttagagatctcaaagtcttcagctaaagtgtcttattggcaaaatagggatttgggaagtgttttacccatgctgccttccaaattcccttcaaatgagtccacaatctggctacttgcttttcttatctacaagaatggctttgacgtagacatcactcttctcttagtgcttccattctagcaaagtgaatcactcctgcaatttgccccagcagggtgggtgcctccaaggcccaaaaacatgacaggcttcagggatgaaaaccactagctagaggcctctgtctgtaaaacagcttcttccatggagaggcctcagtacacaatagtgaaggaagtagtggttgtggtggtgtcatcgttcactgcctcgtgaattttcacctctacctggcactaattccaggctgtgctgagaggagatcagtcctaccagctgtccacactgagacaggagaacttgtaaaacaagagcaggtctaggtttggtgaagagcaaagcaaaggaaggaatttaaaatgcagaggggagacaggttacatacaatgtcagcagaactagggctacagaaagtgaacaaagcaagttcaagactcagagtttgtaggaacaactgagggttgagtcagcagaggttttccagaaagacaagatgaaggcagaaggacagtataactgtcagtcctgagtgaaactcacgggactcaacaccacctcctctctgggtggattctaagccctgactttgtctcctcagcagccttgaagcaacgcatctcacccttcaaagaggtaacaagaaaaagccacccctggctgggtgatatagtttggctgtgtccccacccaaatatcatcttgaactgtagctcccagaattcccacgtgtcatgagagggacccagtaggaggtaattgaatcatgggggcagactttcctgtgctgttcgcatgatagtgaataactaagtctcaagagatctgatggtcttataaaggggagttcccctgcacatgttctcttgcctgccaccatataaacctgtcttgcttcccttttgtcctccaccatgattgtgaggcctccccagccatgtggaactgtaagtcaattaaacctctttcctttataaattacccagtctcaggtatgtctttattaacattgtgagaacagattaatacactgagctaaacaattatggagccatgggctcattcatctggagggggaattagtgttcctcataaagctcttaagttaaaaaggaatttgaacctatggctcaccccgttaggaattagttctgttctgcatttttcaacctctatgtagcattttgccagtaagagttcaagatttttttctcttttgatgtcatacccttcatttagaccacaatttcaccattctgccctctgcctgccatctcttttggtggatgtttcatctgctcatctcaaatggctcagctacccacactccctgccagtcttcattcctcttggatcccacttacctagaagtgcctgagaaaacaaaaccaacatgcccttctcttgtggagtcctccattatggtgtctatgggatgtttatccagcattgtataaaacctgaatgagacagaaaggtcaacttaggtcctggtcccctcccttcacttcagtcagatcctcacacagccctaacttataccctaccatcatttaattgctctactttaagtctaactttgaaaatctctttccctaaagccctctgtcctctcacttcttatgccttccagaaaattccttcaacttttcttattctgcttctaatcccagtggattctcttacacggacccagatcctcacagtgggtctccactggagaatggagagcggctttgttttgtctttgtgccttcttcctggctcccaggatccttggtccctgtgcatagggacctctcctgtgctgtcctcagcttctgctattccaggctgtagagaaatttttcaatttcatccacaaccctacatataaaagcattatgaactccatagttctgaaggctaattatcaaaaggattcagcaaaaaggggggaaagcaaataacaaagagtgaactagtagattattgattcgagaacaaaatacgtaggtgcttgattagaaagatggatttgattgggatgtactagttatgctgagacacatagtcataatggaacagcagattagaattgtctgaccataggttctgttttatctaaatatatgtcatgacatatatcagctctgccacagttctattttgggatcttcataccactggcaaaattagtacttaacattgcgagatggggttagggattcttgacaagaacagtgaggggcagctgcctacaatagccctcctccatccacatgaattgttattaaaataacccaaaggcttgtgaataaaagacaaatatattgcaagggtatgacagaataaaggatagtatttatatacataccagaaactaggaagagtatattttaacctcagaggcaatagagaggcactgcaaaagaagaagaaaaaaaaaaaaaagacgatggccaacacttctggaattaagcaatgtaatcagtaagaaataaggaataaactctggtagatagcttgccccttcacctacactctgaattggaaaagtaaaagccatgctgaatataagaatggcatgaaaggtggagagggtctcctcctagcaacaatcacttccacttctctctccttggggaaaataacattgagacatcagtaggattgtagaaaaatctttaatgttttcttctaaggtgcactttccatatttattaatggaagcaagcatgtcatgtagaaacatacgttttaaaaatggtcagcaatcctacagggctaaacaattagagtgttgtattttgttttgttttttaattcatttgcccttgatcagggattggcgttaaaggcatgaccttggaaaaatttagtcaaaacccacaccctgtccatttccaacttgattatgtacatttccttcggaatagtatagatcctggactgtggggagaaacagagccaaactgatgtgtagcactcaaaagcatttctacagctcaagaacaaaaattcactaatgctccaatggtgtgcagggtatttctctttcaaaaattgatttactgctctaaatggaaaaaaaaatcaaagttttatttcaacaagttttatgacaacatttgctctgggaacaacagcaggcagacttaagagggaaggccaagggaaagaataactatcagaattttgaaagaaacgcaacagacaaattttaaaaatcaagatggatgttttgaatcatcagaaatgtaagttgttatacagggagcaaacatttagaaatgaaactcctattagaaaagataataagacatattcaagcaacaccatctacacataatagctttttctgtaacagtgaggagaactgaaggagcaggagcaatctataaagaaatagagaagacattctcaatttaagcaagactgtgggttcaaatttagaatattcatcgtgttccaggcaagcctacacaggtcccagtacagttttaaaattcaatcaataaaagatgattcctacacaaatctagaaaagaagtaaacaaaatatttacttccaaacaaaataaaataaaatttaggttggctgcaattcttcctcactaaaactaagcattagaattaaacacacaatgtatataaagctttgaaggacacagtttatgaatcaaaagctgtgtatccagccaacatttattcctgtatgcataacatagaaatgatgatatagtcaaagacccataatatttttcctaaatatcttaacaaatatctgctctaggattcacagaataatcaaaatgaagaactcaaatataggtttatcaatacagaaaagaactactgatgagtattaaaaacagtgaaaaatcacctaattgtttaaagtgtaacatgaaaataacaaaaattatctctcaattacaatataaaattaaaaatgaactatgggcacaaataaactagagatgatctattttttaacgtatgtctccaaaggcaatttttaaagcattttttatatacctgttggtcattcgtatggtgtggttttgttgcttttgttattatttttaattgacacataataattacacatacttatggagtactgtgtgatattttgatacatttatacaatgtgtaatgatcaaatcatggtaattggcatatctgtcacctcaaacagctatcatgtctttgtgttggggacgttcaaaatccactttttaactatttgaaaatatacattaaattattgctagttatagtcactctatagcgctgcagaacactagaacttatttccctgtctagctatacttttgtatctgccattcaaccttaagctatccttttgagaagataaagaaacaggagattacaaagataaaatgacttcctcaaggtcataaaactatgctggcagaaccagaatttgaacctaaagagtataactccaaaacagcatagctttttttctgcactatgccaaaaaaaaaagctgcctgtttattggatgatgtacagaagttgtaaaggacataacctggacaggtgacacaatgaattactatcaagatactttcagtttcatcatttagactaggagcatcctgagggcagggcatgttggggaaataaggctatacaaaaattacagacaaatttaagaagagtttgagctaatacaatattgtgtaattcacaaagtaatgaaggaagaaagagaagaataaaaaaaggatggagggagggaggaagaaaggaaagaagggaaaaggaaaggtcattgtggttatatgtttcatagagagggcgattctttgacatcagttaaaatgatgtgaatgtgatctggcaaggagagaactgataagataatgcaaatcattgcacccttctgtccttcaagttttggaggtcatttaggaagtgaaaagcactttctatgtatctttagtagcaactggaaaaagcctcccttggtgacaacatccttgttggttgattaaataaaactaaaaacactctctagactttgcctgttggttcagggatactgaactaggccctctcccatattttctatgttctttagaatttactgccctcccccaccgcccatgcacacacattcaacccacacccattcaggaattaatggtatgctgcaacttctacttcttcccctgtttagttaacttcactctaatcccagaagttagggagccagaatgacacagatgtgaattcgttatcagatcaagctttgggaaatgttcaactccacttcatctcatttccctggccttttttcttcaggggcccccagttaccctcagaatacctcactgcagtgaaactctccctatatgcataagttcatgaatataattagcagaactggaaagaaccatgtaaatcatttcacctaaagagaacaataccaagactcagagggggacaatgcttttccaaagactcacagcaaaatcagtgactaagccagatctagaggtcacatcgtcattctcaacatgctttactagaactttgtctacactctccaggctgttaatgcagtaatgagtcaatcttatgaatttgtgtgttctaatgagaaacaaattcacttcctcaatttccttccaggtaaaatttacattttttcacaaaagccttttgaaaagtcccaaaagttcaattaaagaagcacctgtaagacaaaatttctagacataaaaatatagtaaacattctacgtcttagttactccaaaatagactctgactggctcatctatgtccatataaaaggtggggcttctctcatctgttgggcaaagatgtctatgaaggtggttcatgaaagctaagatttatttttaggaaagaacagctcaatctatgtaagcaagaaataggaaaagaggaagtaaattctatatatccttaaaagttcaccccagccaacttaggaaacttgcacctgggaaagctacatggagaactctggtccttttcctgggagatcagataacttgagagacaggaagtcaaaagcacagacattaaacaatgaacgagaaagtcagtcacgttagggagagatcaagtaagaaatactgcaataaatctgcaaacaaaactccatctgaagacagcagcatctgaaagatgagagaaaaatgagcaaactatgctttttctttttagtcatgaggaatatgcattatgtttagaatggaattaggattggtgcatagcctttagtaatgcaattcatctcacacaccaagtcagaaatattcagaaagattgccttagaaccagggggcaagactgcactgggattcttccaaaatcatgttgtggttgattaactatggctgccatggcgggacaataggagcagtggtgtcatgcttgcaatattccttcgtgtgtgacatccctgttacacccagcctttaggacacacacagttaagagtcccccactgagaatgactatatcttcaaagacaatgttactccttatgatagccttgccatatgtccatctcctattactggttttgagttctgggtttcctggctctttgccctcagctgttacacagcactcagatggagaggttctgctgaggccagaccactcatatgagtctaattcatcctgatcctgagagaaactctttcttctctgctactggcattaatatccctattatagtacatttgtggtggtgttttgttggatgccccatcttctctcacctacaggtgggatccccaattgtgtggatcctggtaagaagagcccccacccctccctggaatccaggacactggcattgaactcactccaggccaactggagggccctatctgtgtcgtcaaagcttgattaaatgatacattgcaaggccaatttagaatttcttgaaagaggaaatgcgtggtggcatggtggtgttgtctatttgtagcagtgttcactagaggttctggcagtagtgatatccatggtgtccatggggtgtgaccagactcttcccagattgtgaccttggctgctgcccgtcttccctgagatcaagcctgcttctctagccctctcattcattctataaacaccttgatgttcctctactagatgccttttctgtttcagttaatcataatttatcttacttgtaccaagaacatggacagacctgacaaagggtcatagatttttttccaaagctttgcttctttgaaatttccctctcacaaaggagatttctctgcagcaaagcctttgaggcaatggttcaggctatggcatacataagtctgtaactgacccaagataggaaagaaaatgggtacaagtatctcaaaaatataaccctacccaaaacacaccgtgggggtttagaaaatacttggcatgtgaaacacttccttctaacttaaacaattcaacaagcaaaaaccaatcccttttaaaaatatgggcccaggacatggacagacacttttcaaaagaaaatgtacatgtggccaacaaatatattaaaaaatgctcacagcattactagcatttttgctagtgatggatgacaggatcattcatatgccaaacctcagcaatttatccatgtaacaaacctgcacatgtacccctgaacctaaaataaaagtagaaaaagaagacttccttctaccatttcacaaactatacaaccctagagaagttatatagattctcttaatctaatttccctcatctgtaaaatggaaagttcattcattcattcatttaacaagtatttatcaagtatttactgtctgctctgcactgaggaaataataatgaatcaaaacagaaaaggcatttacctacgtagagcttaggcttttggtggagaaaaacaaaaaaaaaagatcacattattttgatatttacaagctgtgataagtgctactaaaaaaagaaacatattttcttcgtggggttctgatttattcaaggaggtaagagaaatttatccagagaagaaagattaaggctgaggagtaaaacattggtagtcagggccgggcatggtggctcatgcttgtaaacctagcactttaggaggctgaggcaggtggatcacctgaggtcaggagttcgagaccagcctggtgaacatggagaaaccccatctctactaaaaatacaaaaaaattagctgggtatggtggcacacgcctataatccattactcgggaggctgaggcaggagaatcgcttgaacttgggagacggaggttgcagtgagccaagatcgtgccactgcactccagcctgggtgacagaaccagactccatctcaaaaaaaaaaaattggtagtcaggcaactgggttacaagaatgtgtgtgtgtccatgtgtgtgcttgtgtgtaaagggcagaggaagagaatttgaggcagaaaggagactattcacagtgagtccagtgtaatgagggaggatgtatgtcaaggaactgaaggaaaaccaatgggcttctagtgcagggaatgaaaaagagaactatgtgaaacaagatgggagggtgaatgagatcagaacaggtagtgaaaaagccatgtcagggacatgaaaatactttaagaagtgagtaaagaggaccatttttcttcttcttcttcctcctcatcatcttcttcttcttcttcttcttcttcttcttcttcttcttcttcttcttcttcttcttcttcttcaaagattcctctggctgctctggattatttggtgggggcggggtagggcaaaatataataatggagacactataggaacccacttcaatatccaggcaaaggatggtcataatctggcctagggtagtggtcacaaagataaaaatatctgggagtggtaaaatcaacaggatttggtgatgaatgaaataagatagagaggaaggtgtgaaagatgattccataatctctgtctgcttgcatgaatggctggagctaacattccctgagatatggaccttgggcttgctttgagggacaggtcatgaattgggctttaggcatgttgactgtggggtgctagtgagattcccaacagcagatattgaagcagctggatacatgtttgtataacccagagggctgtaggtagaaaacacttggaaatcactcacgtggagaagttgcccaaagccacaggtattagtgagtttctgtagggagagagtgaacaggggatgttctagcactgagccctgagaagttataacataaaaaacatggatacaaaaagttggctaagaacagtaagaactaactggagatctaggaggaaaccaagatcattttcatagaatccaagagaagagcatttcaaggggagtgaaaaggagtgttgagtgctgccaagagattaagagacatgaggactaaaagagtcccattaggtgccctagcaagaagtaacatcacagggtcagtcaattacagggtattgtcaccataagtgcctgatatacatattaagggaaggcaagcgacactaccaaagtctactcacatccagccaaaagtcaaagtgaattcttaaaatagtgagtctttatattattatggttctttgcagttttcaaatgatttttacaatgtaagttatcatacctgattcaataagcccgcaagttcacccacatatgacgtccactttacagatgatgaaactgtggcccagaaagtttaagggatgtgtcaaatgtcacacagctcacagatccagggacatggcttaaatccagatatcttgattctaacttcagttgaggaagagaaagagtgctgccccacgctgcctgatttacaacgtgaagtgaaatctttgaaaagaaaaataagacaatgtcactcaagctcttatctgaggatttcctgggtttgaagacagagctcaaactcatacaaggtgattttacaggttttagaaagaccttctgtttcaaataagatgttttctatcaactcattggcatttgttgtttcttacccaggggtcatctgagtctgcagataggcttgctttatgctgctccgtcagatctcttctaaagattagtgcgcaattctggacattacattttaatggtaacatggattcaactaaagggtaagcaaaggacaccgacaggaatagggagggtgccatttatagagaaaagactgagaggtccatattgttattttacctgaaagatataataaacagaggatgctgtttatcatgagtagatgctgatgagaaaatatttcaatgtgtgtggtgtgtgtatctctgtgtgcatgtaacaacaacaaaaaaacactttctaggcatgagagctacttaatggctcataagactttaaaggtcatgtggtccccatcagtaaaggtgattaaggagaaattaaacgcacatatgtatcacttattctgaccatagacaacagaggctattcctctcaggcagttggcaggtgcagtaaactaaggttaggaaaaagaagaataccaagaagcaatgacagttctgaactctgcaacaaaattatcagccccaatatgaaggaagtggtagccagagaacacttagataaaattaaaaggaatacatgaggccgggcgtggtggctcacgcctgtaatcccagcactttgggaggccaaggcgggcggatcacgaggtcaggagatagagaccgtcctggctaacacggtgaaaccctgtctctactaaaaatacaaaaatttagccaggcgtgggttgcaggcgcctgtagtcccagctactggggaggctgaggcaggagaatggcctgaacccgggaggcggagcttgcagtgagcggagatcgcgccactgcactccagcctgggctacagagcgagactcagtctcaaaaaaaaaaaaaaaaaaaaagaaaagaaaaaagaaacacatgagtacagaatctagggatctagtaaaaaaaaaaaaagttcttgatagtaaaaaagaaaaatcacaattgcttaaacattcaagaaatatacattgagtgataaatattataaaatggctatcatgtacaataaatatgttaaacgctacatatatatatataatctcatttattcttcacaacaaacctagaaaaatactaattattaattccatcgtatagatgaggaaactgaggcttacattcatcacacaactggtgagtgagttaggaacccaactcagctatttctgatcgtgagcaccatgtttatgccctctattgagaaagcaagtgggaatataatagtgaataagattcagaccttagcgtacttacagtctagaatgaatataaaaataagtgagcaattaaaatgcagtatgatcagaataatgaattagtggatatggaacatttttcatgcctgtaaaattccctaactgcccatttctgataggaccagtctctgaactttgccagtttgaagggaaaatgagtgggtgaaaaaaatgaggcatactgattaagaacattagttatggtgttatgcagacctgggtttaaattctgactccttcactcagtgttacaggatggttttccacgaatctgttatatttccacacatctttggagcaacgatctttgtttcagactctcttttcaaggacgtttgaatagcaagcaaccttggaagacagaatgtctccctttggaataaatgtcatacatacttactgtccactataatatgtctctcttcagagcaaaaggaagacatgctcactttccattaaaaaatatttttgttctctgcactcagggtttctctcccataataacccattgaatgcgcaggtgtcacctggctctatttatatagcccagtgggaatcaggacttgggaaactgatgcaaatgatattctggctattgatattgctgtgaataataagttgtccttcaggtctgacctaggagtctgatgtcttttatgtatgtccatgaaagggtgtcacgttaacttgtcagcttgcagataaggtacaatctcagaccgttcaccattcttgacactcactaaccaggaaatttggggcaaattatttgctctcactaagctcctatatttttagtcataaactggggcagagcaagtgtcccagtatcatttaatactattaaatgcagcaacttctgtgtagctctttacccaatatatagcatatctcatcaacattagctaatactcacatgggaacataaagctgagatggaaagtacggaggtattgaggtaaatataggctcttcctgatgctataggcaggatttacttgctatcagagattgaaatagattatgaataaaataccagctccaactgagcactattggctgcctaagctgctgtgatgagaaagattttgaagcaaaatctggactgagcagagaagattgcctgatagagtattgatgtttgctatgggtcttgactaggggaaaatgaattacacattcttcatatttgcctcttgtgttaagatgttatgtaatatctcttccacctctatttgattctataccacaaacttccatctttgaaagaagacataaaatgcaaataatcctggaagaggaaatacagtgatttagttatctcatttaattatctaggggtacatttgcaattagtttatcttgaagattttcatcagaatgatacactactcataattaaacatgctgcgggtactttattaagattggtttatagtcgttctggtgctaacaattgcaaatgcatccctacctgcagatcctctcatgttggtactcttgggatgcaaatttacttcaaaaatctgtagccattctaccttgggagtatttaccatgtgcctaaggatgagtctgaaaggatcagatgggctgacttcactgcatcatgccagagaaggttccaataatactctttaaggggctagtcccttgtctctgccttcattttaagcgacctgcagggccttctcctatggcaataaatattcttatggaaagaaatttggcaagatgtatcttaaaaatgttcactgacttggatctgattatgtctaggaatttatcctgggaaaataattgcagctgtgcacattgatttatgtacaaggttattcattatagaatgtttgatgtttttaaaataccatttttgcaaatgaagatacaataaataaattatagttaaccatattgccttaacagtcattaaaataatatatttggataaatttaatgacataggaaatttatctcatgtaatattaatgaagaaaaattgggtatatataaacaaaattattagaaacaaatgtttaaaaaaaataggatatttatcccacaaatagaatatgtgtggaaagagatgtttaatttttgtttcatttcaggtgtaaaaagtatccattttgcagagcaattctgtaggctagactgcattctagaagaactgacctatactcagaaacaacagtgtatgatctgagatgaattgtttcatgtgccccacattcttttaacttctagaaataacatattgattttcgtatcccagatacaacttcctcactatgggaagtcttggtaggactattgatcagggtgtctgccctcttcttcctggccaaggtggcacacacatgacccagtctaggataatggacaatctcagggatttggattgcaggaacaggaatgaaaattgatattgacctaaccctgtaacaatggcctgaagacacggacgattattattattattattattattattattattatttgctacaaagaatcctattgctattttgtcctcatctttctgaacctaactcttcagctattcatccttgacctacaaactaacctgctaataagtatgctttcgttaaagttacccagaattggactttgtgtcttataactacagagacataagataataaaataaaaatatatgtatacatgtgctattcatgtggtacggatctaagatccaaaaccaatgaggctcctggccacaccccagtctatgacctcctttgtatgtaggacgccgagccctgccttcatgctctcttgtaggttgccagtcctgggcagccactttcagaactcagctcctttccacttgttttcaactggcacactaaccagaggggcaggcattgcccagtgaattgtcaaaggcaccccgctctacacagctctttgtgtagccacctcccagacgtcctgcactgattacctgcagtgggtggcattatcatcagaaagccagggaatgatgcttctggaatccattttttatttcaatgcaagaatcctttgattttcatgtatgctgaatggatttttcttctagtggcaattattgctccaatggttggcattttccattcacatggtttaaattcagtgatattacaatctctgaataacttgaaaagtctcagcttgacttatatgattccccaccccctttggaaaagtttcacataataggtctctataccagtgcacattgaagaattaatgaaacgcaatagcctcctaccaaatgaggttcttatgagttaactctaaatactatccaaatgcttctaccaagaatacttctattctgaatcttcccatccaggccttttttaataaagtccagttcaaaattcagtccttctagattaatgctgaaagagcataatgttttttaaaaaaccaattttgtatctgctagcactaggctagatacatgttcaatctcttgcaagctatgtgatttttagtgaagttgctcaacttttctgagaatcaatttctcagctatatatatatttatatatataatatataatatatataatacaaatattatatatataatatattatatttatatatataatatatatataaagtcttaaatacatttttgtgagaattaagaaagatagtgtatgtaaagtacttggtatttgggaggtatacactaagtgttaaatcctttgtacttgtagtattttaactttgttttctgtatttgagtgtatgtattcccgtaacttatgcactttatttatatggagctgatttgttgttgttaatattttattatggaatgtgtttttttttaaaaaaaaaagcaaaatgtaacaaatcaacaaataaaacattatagtatgatgatatctttccagaagagaaataaaatctcctcacatttttcttctgtttctccacaaatactattacatgttgtttctacatacactgaccagttgttcaattttcccttaagagacagtaataaatagcatatgtttatatagcattacactatttttcagtgtttcatattcattgctacatttgattgtgttcttgtggtttgttctctcataggctacattgatggctaacttccatttcataatgtataaaaattgcagtaacagtgtgattattcatggtcccaccaaggacaaaaataacgcaaagacaatgacctctcctttactcctttcatacactcactcacacttgtccagagtttcctcttgctttctactcttctgaaatcctgttctgaggaattattagtcacggtaaagcataaatatctgacaaagcttaatcatttgttctgaggggcctttagagaaggcaaagggagtaaaaaattgtggggttttttgtttgtctgttttgttttttgtgggttgtttgtctgttttgagacagagtttcactttgttgcccaggctggagtgtagtggcacagtttcgactcactgcaacctccgcctccaaggttcaagcaattcttattcctcagcctcccgcatagctggtattacaggcgccagccatcacgcccggttgatttttttttttttttttttaatacagatgggggtctcaccattttgcccaggctggtctcgaactcctgagctcaggcaatctgctcatctcggcctcccaaagtgctaggattacaggcgtgagccaccgtgtccggccaaatagttttaatatgaagaaaacttcagagttttgggagctaatctgtgtatattgagagagggcaatttattttttcctgctcagtctattaaagttggtcagactatcagaaataaagtgacagtagactgtctagaaacatgattaaatacagaaaacattttgctttgtgttgcattggcttatgttttgtctctggcctgctccgctaagcattgagggaacaggaatgaaaaattaatattgacctaacccctgtcacagttgcctgaagagacagactattattattagtgttattagtattattttgctacaaagaaccctgttgctattttgtcctcatttttctgaacctaactcttcagctattcattcttgacctacaatttaaccttctaataagtatgcttattgtaagtacatcattcttatcctagacactcaataaggcacatagtcctgcattaaagacccagtcaaccctgtatgtcctattgatgtcaataactagacactatggaatagcatgattttatactcagaagtccaagatccctccttgaagcccattggaagaaacccacatctgtaggtcttcagcccagagatccctatgtgattaggaagatatttcctaattgataaaaaagaacagagatttcaaactttttttccaatagtggaagctatttattctctgacatttgtctttcacaaaatattgctttacaaattatatacaagtatgttatccttagttgattcagggaaaaatatttcccagccatgtctactaaacctctcatgctccctttggcagctctgaggcacctccacaaagccccaaatttgcataaagtcctggtttaaagatgcttattttcataatgttttgcatctctctagaaagtttcttcaggcactgggggactccaaaatgtgggaaggcagagtggaggagaggttgaaaactacctattgggtaccatgttcactgtttggatgatgagttcaattaaagtccaaacttcaacattacccaatatatccatggaacaaaccagcatgtgtaccccctaacctaacattttaaaatattaaatacataaattaatgaatattttttgaaaaagaagaaagttccttcaagcaaccataagaaaaatggctcaaattctttttggaatagggtgaactacggtgaaacaaacaaataaataaataaatcttggtggaaatttccagagaaactttcctcaagagctattagttaagagcttaaagtctcgagcaggaagaacctaggttcacattcctgctttgacatctacaaggtgaattaccttgggtgatttacttagctttactaagcctgtttgttcaaggttaaatgaagataataatagtactttacttaaagggttgttgggagaattaaataaaataagtcttagtgtctagcatagttatggcatatgtgaagcacaaaataaatgttgcctttcattatttatgtcattatagtttttttccaaatctgtaatgcatttaataccgaacctgcgaaaactcactttctcctttttttcttctaatacttgctaatccattattctatctcctttgtacaccaaccattacatgtacatactgactggcctcaggtcgcatggcttttaaatgccataatgaggattcaatgatctttctactacatctgaccactctaaaatactcggaaaaataattttgttactctttttcctacgtctcctagccttcctttttttttttttttttttggtagtgttgaagaaaaacacttaagattcagcagccaagaactagtgaccaaacagtcccacaaggaagagcatgtaatctagatatacccctttatcaggtataaaatgatgatcccatcagacaagtcaggatacttggcacaccccatttaataaatcaggatccagagagaagaacagttgtcactggaaggacttgtgtacagagcagtaaaacaagggtagaagtaggtataggtggctcagaatatggccaagatcctttaaagagcataaaatgtcacaggcaacatggtatggaccccattgctagaaccaaacaacaaaatgcaaaacgacttactttggactcctatgaaaacagtactctatcaattgatgtttcatttttaaaaggactatattgttctattggcatcatatcatttattattcataataatcctatatagtaggtgttgatgcttttctcagataagggaactgaggtttagaatggctgaattatctgatcaaaatttcagattttggaagtgacagttgttttgggggcacaatttcctgatctcagtacctggttctagaatgtactgatggtaaaatctgagagtagaacctatcacagaactttcctagaactaaactttcacaaaaagaagagttattcatgacaaccagagatattctgggggcgatctagatgtggagacagcagcaaagcggagcttgaggcttgcaatgctctcgccaattctctcagagtttcaaatatctcagtctgagctaaaatttgtggttatgtgtctgcttctgcctaaaaggtaactagggtatgaagtcaattacctaggtcgcagagattcccaaaatactttaattaatctattgaggtaatcaaggcaatagtacttcagcatgaatactatgaaaatgatttatatttgcctccatcttccccttgtctagacacagcagtctttactaggtcttttccaggacaatctctacaccacttggtgtcttatttgcccctcatccccctgtaccctttctttactttgatcatggttaaatacaaagcagttcattgcatttatctctgccactactcatgatgcctgatatatcagcctttttgtaggccagagaacaaattgcaatcggcagagtaaaattacttgtcaaagatcatggaatatcaatacaatattaagatagaagtcatgatatgcaaagtggaaattcctcttagcaacattaactgactcaccttgtccacaatttgatatatcatgcatactgatggtataggcttctttgcatattctgattgcacagtgggtgatatgcaggcaagagtgaaatgtaagtttgtggatagggtattgcagcatcagtaggtaatgagattgggaagaacattttaaagcagtttatattcaatcaagcgtgctattcttgcaacaaatagttattaggtatctcttatattaaggttattgagcagtgtttctttgaaattctaactcatgggtttcagacatctgtgtttactaaatatatttttcttggtttcatcccagaatttttattgagaatctctagggttagggctaataaattgccccaagtgattctgatttgctctagcctttgaagactattatgctatgtactggaggttagaaacacaaactattctgattgtgaaggagaatataagctggttgaagatccagccaaatataaatggaaagataattaacattctatagattagatacacctatagattagatatattacaatgtagttatagtataatagccaacaatagcttggaagtcagaggaagaatagcatgagtttgactgtttcaggaaagcatcaaatatgggtaagatataacaacaaaaagcatgtatgtgaaggcatcagagagctgatgaagacaccaagtattgagaaaccattatattagaaagaaaggaagcccattgaggtgtggtcaatagtctgcatattgcttttactctcaagatattttcttaatctttttttaaaaattgaggtcaagttacggtgaaaccctgtctctactaaaaacacaaaaattagccaggcgtggtggcgggcgcctgtagtcctagctactcaggaggctgaggcaggagaatggtgtgaacccgggaggcagagcttgcagtgagacgagatcacgccactgcactccagcctggacgacagagcgagactccttctcaaaaaaaaaaaaaaaaaaaaaaaaaatgaggtcaagttaatataccagaaattttttctttctaaaaattatttcagattcatagggtacatgtggagctttgttaaatagatatattgtgtaaaggtgaggtttgtgcttctagggtccccatctcccaaatcgtgacaattttatccaataggtaattcttcaacccttacccctctcctaacctccccacttttggagttcccaatgtctgttacttccatcttcatgtcattgtgtacccattgtttagctaccacttataactgaaaacatgtggaatttgattttctgtttctaagctgtttcacttaggataatggcctccagctccatccatgttgctgcaaaagtcatgattttattcttttttatggttgcatagtattctatgatatatatatgccacattttttttattccaatccacctctgatggacacttaggttgattctatgactttgatgttgtgaatagtgctgtgatcaacatacaagcacaggagtcttttttaatataataattcattttcctttagatagatacccactagtgggcttgctgggtcaaatgttagtcctagttttagtcctttgagaaatctccatactgttttccatatgtggtctactaatttacattctcacaaacagtgtatagtcattccctttcctctgcatccacaccaacatctgttgttttttgacttactaataatcgtcattctgactaatgtgaaatggtatctcactgtggctgtaatttgcatttctctgatggttagcgatgtggggcatgttttaatatatttgttggccacttgtatgtcttcttttgagaaatgtcagtttatgttctttccccacttgttaatgtttttgtttgtttgttttcttgttgacttgtttgaattccttgtggattctggatattacttgtctgagataatttgtaaatattttctttaattctgtaggttacctttttactctgctatttctttttctgtgcaaaaggttttttagtttagataagtcccatttgtctatttttgtttctgttgcatttatctttgagatcttagtcataaattctctgcctagaccaatgttcagaagagtttttcttaggttttctgctagaatttgtataatctgaggtcttacatttaacttcaagctatagttacatataatctatcttgagttaatttttgtatatggtgagaaatgggagtctagtttcattctcctgcctgtagctagccaatttttcccaataccatttagtgaacaggatatcattcccattgtttatttatgtatgtatttatttaacttttattttacaatcgggggtacatgtgcatgtttgttgcataggtatattacatgatgctgagattaggagtacaaatgaatctgtcactcaggtaaagagcacagtatccaataggtagtttttttcaacccctacccctctccattcttccctgctcttttattccccagcatctattgttcccatttttatgaccatgtatacccaatatttagctcctattcttgagaacaggtggtatttggctttctgtttctgtgttagttcacttatgataatgtttcccactgcatccatactgatgatgcaaaggacttaattttatactttttgtggctgtgtagtatttcatggtgtatatgtaccacattttctttatccgatccaccattgatgaacatcgtatttgattccatgtctttgctattgtgaatagtgctggaatgaacatacagacacatatgaccttttgataaaatcacttattttcctttggtatgagatttctgagtcaaatggtagttcaactctcagttctttgagaaatctccaaaattgcttcccacagtggctgaactaatttgcattcctgccaacagcatataactgttccctttactctacagccttatcagcatttgttattttttgactttttaataatagccattctgattggtgtgagatgatatctcgttgtttttatttgcatttctctaataagtcgtgataattagcattttttcacatttgttgactgcttgtataattttttttttctggttggtaggttttttattactaattcagtttcagaactgttattggtgtgttcaggttttcaatttcttcctggttcaatcttgagagattgtgtatctccaggaatttatccattttttctggttttcctaatttgtgtgcatagaggtcttcaaaatagtctctgaagatcttttgtatttctgtgaggctggctgtaataatatctttgtcatttctgattgtgcttatttggatattctctctttttttctgtgttaatctagctagcagtctattaattttgtttatcctttcaaaaaactaacttttgtttgcattgttcttttgtatggatttttgtgtctcaatttctttcagtactcctctgatgtggattatttcataccttctactagctttggggttgttttgttctttttcattgtagttcctataggtgtgatcatagatagttaatttgagatatttctagcttcttgataacttcttaaaagtgtttagtactataaactttcctcttaacactgctgtattagtccattctcacacagctataaagacatatctgagactgggtaacttataaagaaaagaagcttaattggctcatggttctgtgagctatgcaggcttctgcttctggggagcctcagaaaacttacaatcatggcgaaaggcaaaggggaagcagtcctatattcaaatggccagcaggagaaagagagcaaaggggaaggtggcacacactttttaaacaaccagaccccttgagaactctatcatgaggcagcactagggagatggtgctgaaatattagaagctacccccatgatccaatcacctcccaccaggacccacgtccaacactggattgcaattcaacatgagatttgggtggggagacagagccaaaccatatcaactgctttaactgcattccaaatattttggtatgttgtgtctgatttcattacatttgaagaattttttagtttctggcttaattttgtttacccaaaagtcatttagcagcaagttgtctaatttccatgtgatggtatgattttgagatatcttcttgacattgagttctatttttattgcactgtggtcagaaagtgtgcttggcatgatttcaattttttgaatttattgagacttgctttatggccaaggatgcggacaatgttagagtacgtactgtgtgcaggagagaattgttttttgtttaaagtctgttttatcagaatagcaacaacccctcttttttgtttaccatttgcatataagatctttctctgttcctttactttgagcctgtgagtgtcattgcatgtggaatgggtttcttgaagacagcatacggtggggtcttgtttctttattccacttgtcattctatgccaatttaagtgggatatttggaacattacattcaagattaatattgatacgtaaaattttgatcctgtcattgtgtcgttagcttgttgttttatagacttgattgtgtagttgctatattgtgtctgtgagctatgtgcttaagtgtgtttttgtggtggcagatatcattcttttgttttcatgtttagcactcccttaaggacctactgtaagatcagtctagtggtcatgaattcccttagtgtttgcttgcttgtctgaaaataattttatttcttcttcacttattatgcttagttttgcaggaaattaaattcttggttggaatttctttttttttaaggatgttaaaaatagtcccccagtctattctggcttgaaaagtttctgctaagaagtcctatgctagactgttggagttctctctgtaagtgacctggccctccctctagcagttttaaagaatactttttcttttgagttgaccttggaaaacctaatgccattgtgtcttggggatgattgttttttatagtatctcacaagggttctccgaatttcttgaatttgtgtgtcaacctctctagaaagactgggaaacatttcataaactatgtcctcaaatatgttttccaacttgcttattctctctccatctctctcaggaatgccgatgagtcatatgtttggcttctgtacataatctcacatttctcaaaggttttgttcattttttaaaattctttcttctttatttttgtctgatggcattgattcaaaggacatgtcttccagctcttggattcttttctcagcttggtgtattctattttaaatgcttccaactgtattatagaattcctgtagtgaatttttcagttccatttgttcaattttgttctctcttaaaatagctattttgtctttcaactcttggattattttattggattccttagattgggtttcaactttctgttgcatcttattgagctccagctgtgtctctacctactctctgggaggctccctgccagcttaactatccttgggcatcatgagatctgttgcacctaggatcccagaagtccactgtgagagtgaattgccctgcagttgctccactcactacttccttaggagctgttcagagctaggaatgagtcctggtagtcagcaatcccatgtaggattccaagcttccttcctcttcaatgtcagtgcctctctcttgatttagagtgttttctctaaaaagagctgtttaaagtatgatgacttaccccacattttgatctcacttggtaggagaggctctcttggctcttctagtcatccatcttgtcctgctatctgtctctattagttatatcgactttgttaaagatcagctggttgtaggtatgtgattctattttagggctctctatcctgctctgttaatctatgtgttcatttttgtaccagtaccatgctgttttaggtaccataaccttgtagtataattttaagtcaggtaatgtgacacctccagctttgttcttttgcttaaggttggtttggctatttgggctctttttgggttccatatgaatgttaagcttgttttctaattctgtgaaaaatgacgttggtgatttgatagggaatacattgaatatgtagcttgctttggacattatggtcatttttgtgatatttattcttttaatccatgaacatagggtgtttttccatttgtttgtgtcatctacaatttctttcatcagcattttgtagttctccttgtagatatctttcccttccttgaacattccataaaattaattaaccactttaaagtatacaatttaactggcatttaggacaatcacagtgttattcaataatcaccttatctaattctaaaatattttcatcactgccaaaggagacccagtacagactaaaccatcactccccattcctatgccctagctcttggtatcctctaatctgctttctgtgtttatggatttacctattttgaatatattaagttaatggagtcatagaatacgtatccttttatccctgacttcttttacttggcataatgttttctaggttatccacattttaacctgaatcagcacttcattcctttttagggttgagtaacatttcactgtatgagcataccacatttattaatttatctgttgatggacatttgggtagtttccaccatttggctattgtcagtagtgctgctgtgaacattcacatacaagtattcatttgaatactttttttctattccatagggtatatttaggagtggaattgctgggttataaggtaattctatatatataactctttgtataaccacgtaactgtttactaatgtggctgcagcattttacagtcctaccagcgtatatatataaatataaatatggaaatatatatacctatataattataaagaaaaagtatatatacttcctttttatatatctatcttaatgggtgtgaagtggtattatattgttgttttaatttgcatttttctaattactagtgatgttgaacatctttcatatgcttattggtcatttgtttattttctttggagaaatgtttatttaagtcctctactcattttttaattgggttgcttatttttcttgttaagtgtaatagttctttataaattcttattactataaccttttcagatatatgaattgcaaatatttcttccattttgtagtttgcattcttgctttcttgatagtgccctttaataaacaaaagttttaatttttgatgacttccaacttatttattcattcttaacatgaggtaagaggctgagatgccaagaaaacagtgaaaagttaagtggtgtgttttgctttcttgctactctggagataaaagcagaaataccaataagatggcttttaatttgaggcaagccagagttagataaatccagaccaaaaaatacaacccaacgtctagttagcttagttcctaattggctaaagtgaacagcctccagtctagttgcctcacagaagaaaagtccaccatctagaacaatatagtgagcttttctataaaaagatagcaccatccagaacactactttctacacaggatcagcagataataaaaaactaccatgtatatcaagaagaaggaatggaagttaaaaaccaacaatagaattgatagattagaattataaataaaatatatcacatagagatttaaacatagttatgattaaaaattcaagaaaatggatgacaaaatggagaagttcactaaataactagaatctgtttcaaaagaatcaaatggaaattttagaactgaagaatacaataactgaaattaaaaactcaatagagctgggtggattggctcacatctgtaatcctaacactctgggagaccaaggcaggagggtcatttgagcccaggagtttgagaccagtctgggcaacatagcaaggcctcatctgtatacaaagaaaaaaattagttaagtgtggtggcatgcacctgtggtttcagctacttgggaggctgaggcaggaaaattgcttaagcctaggaggtcaatgttgtaatgagctatattcacatcactgcatcccagcctgggcaacagagtaagaccctgtctcaaaaacaaacaaacaaaactcaagagattcatatcaaagctggctaagcacaagtgaaaatacagttattaaactggaaaatagatcagtagaaaattcttggaccgaatcacagaaagcaaattattgaaaattcagtaaagaacataaaagacatatagggcaaggtgaaacaatttaatataaatgtgactggagttccagatagaaaagagagagaatgggcggaagaaatgtttgaagagctaataaccaagaatttccttccaactgaaagacagccaaccaaagactcaagaatcattacaaatctttagtagagtaaaaatcaagaaaatcatacctgagcacatcatgcaaagctgctaaaaaaacaaagatgaaagaataatcttaaaagcagccaagggaaaggatacaatgccttcaaatgagcaacagtaaggctgacagttaattgctgaataaagaaagccagaaaataatcaataacattattaaaattggaattctataatccagaaaaagaaacgtttttttaaagcgaagaaggtgctgtaaaacatctttgaatttcctacatagatatgagttctcctttgctacaatcctaaatcttggtctttcccttgactctatcttattttactggatgctcagtcaagattctattttacttatttttccataggatttcattatctttgagtcataatcctttttaaaaaaaccaaagatgaaattttttttggtgaagataaagtattttggtgaagataaaagagatttttcttcttattaaatgaaaacctttgagcttgttgattctatatttaagactccagccttgaatggaatttttgtcttttctttttcttctttttttttttttagatggagttttgctctagtcacccaggctggagtacaatggcacaatttcagctcactgccacctctttctcctgggttcaagtgattctcctgcctcagcctcccaagtagctggggttataggcgtcagccaccacacctggctaattcttgtatttttagtagagatggggtttcaccatgttggccaggctgatctcgaactcctgacctcaggtgattcatctgcctcggcctcccaaagtgctgggagtacaggcatgagccactgcgcctggccaagtgggatcttagtcaacatacggtttatttttatctgtaaagaaacaagcatttagttggaaattttctcttaaaacagcaacaaagaacctaaaaaggaggacataccacatagaatcggtaaagcagctaagcagaggctttggaggccaaggaccaaagtatttctttcaagaaaccaaagcagcagccaatttaagtctaaatttaagtctaaatatcctaggtttttaactctaaatatcttcattttacagataagtaaacaggagctcagagagtttaaataagttgttcaagttcactcatctatttagtggcagagccaggaacttactcaagttttccatacacttccaatcccaacattcagagactcagaagtagcatggtttgtgttgccaaaagctctctaacccaaataattttcaccacagaacatccagtgcaacagactcagatgagttcattttaaaaaatataacagtgcctactgtaggccacagttacacctactagatataacatactaagttactaaatcctggaaacacctgatcacttatattcctgaattagttaactcagcttttgagtacaacataaaaagatgggacatgaaacagacaacttttgatacagagggagtggaataataaagagaactaactgtggatgcctggtttgggataaagtgggagattacataagaaggccaagtatgatgttgctgcaagaggggtgttgtgacatctatgggtaaattaaaggggctaggactgaattctagaaagcttttatgcactttataaatttctttaagtctcagttctctctaggtagtttcatctgtctcatgaaccaatcctgttagaactcacagggccctaacatgacacccctgctgagagaaaccctatttcaaaaatggtgtctgagattctttctgttgcctttcttccaggcattcacatgttataatgccataaatgtgtcctatgattttctaggcatggcagtaacatttatagatcaaccgggttaatagcaagaaggctcatgctgaataggaggaaaaccccttcatgggaagcccctggagagaattactctatagatatgcagaggattaggagcagctgcgtagagctaggagaaattcctagatcacttacccccaaatgcctcactttcagaagaaggtagccaaagaccaaataaatgttaaacaacatgtttatggcagaaagaggttctaaacctagagctcttgactcagtctgaaggttttttttttctgtaatactacttaggtaagtgtgataggggacccttgataatcttctgaaccatttcagagaatctgtaaggtcaaactgttttcatcataatgcttaggaattatgtgcccaagaatagagaggactgggatgccatcatcattcttatgggtaatggatgtgtgcttaagcaggcttgtaatttagaatttatctagttttatttctaatatggccaatgtcaacacataaaaactatataaacaaaatctcttttgagtacttagtaatttttaagagagtcaagggtcctgagaccaagtctgagaaccacagttacagttccacaaatataattaagctactattatgactaagacacagggctgacaactttcctcgccctcagaatacatggttctatcctacgagtgccattcggaaagttcagaagaagaaaaggtcatattgtaattagtaacagattcaggaaagagactgatcaagaagtgggtctggaaagatgagaatttcaacaggtggtaatctggagccagaatatttctggttgagagaaatgtacaatcagagacaagacaccaaggagcatatatattctggtcacagtcagtcttcctgggtgaaagtgtcatgtggatgagaagcagtaataggggaaacaaagaaatgagatgagattaagatgtaaagaggcttgagcgccagatggaagcatttggacttatttttaatcaccatgatagttcattgtgtagatgataaataaaaagatactgcccactactgaaaatagaaataactaatgagacaggaaatacttagagccttcttcaggcatagagctgattaagggtatggataaggccttttaagggaaaacacaaaaagtcaacaggaaatgtagagggtgagggtaaagaaacacacctcaaattaagtcaagatgtatccatcatcctgactagttgtccaatcatagcaaatgtctttttctctctggatattcagagagacccacagctaagatcagtaaaatgcacatgtacttcccaaagttgctttgaaaataaattgagtaaataaatagcagtcatgctttgaagatcataaaatgctatatgaatgtatagatgtttagctaccaccatctgtattgtcagtctcagtgggagttattgatataactcaagaaggtgggaggtcaagggttttaagcatgcacaggcctgaggaagccacaagctcctcttcactttacccagacacaggactggaacaatctgcttaactattattactttcttgggaagatcattattttaaaaataacatctcttgatcctatattgagatctgcagtagaatgactacctggaccctttaagaaatgctaccctttaattttatttgttgttttattggctgttttttaatagctaatgcatttagatgttaaagatttagacaaacaaacaagagtagagttaaaagtattcttaagttaaaggtaaatctaattgggtggataagttatgcttcatcacaatgaataggaagcttcccatttggcagaaaaaaaaggtgacaatatcagagagatgaatgggaaatataaatggcaacaccgattagggttctttgatctctttcgtcatctttctgagctgttagagggtaactacttcttgtttttgtctatgaggtatcattttatacaattaggagagaagttagctggtgttcatatttaaagaagtcagctggtgttcatattcaatatccctagctagctgtattagtcggggttctctagagggatagaactaataggatatacatataaaggggagtttattaagcattaactcacacaatcacaaggtcccacaataggccatttgcaagttgaggagcaaggggagccagtccaagtcccaaaactgaagaacttggagtcagatgttcaagggcaggaagcatccagcatgggagaaagatataggttgggaggctaggccagtctagagtgttctcacgtttttctgactgctttatattgtagccactctggcagctgattacatggtgcccacccagattaatggtaggtctgcctttcctagcccacgactcaaatattaatctcctttggcaacaccctcacagacacacccagaatcaatactttgcatccttcagtccaatcaaattgacacaatattaaccatcatactagccaaaataattttaaaattgcctgtagaatgctatcatggtggtcagcaaatgtcccatctggagcttattcaagcctctccaattaagcagtgactatactaagccagctgtgccaaccaggaacagcactgtcttttttaatagaacccatggtcttgccctagtcctggcaaacactttcattcatcttacatctttttccaaatgcactcacaaatattccagctcacggtcatagcttttttgttgtgttatttgttattatttagtttttaaatcaacaaataaaaattatatatattcatcatgtacaacatgttttgaactatgtataccttgttgaatggttagatcaagctaattaacatattcatgtcaggtatcatatgttttaatgaatcttccatggtcaagtattagcaaaagtggaccaaggggctacactggtagcaagtgaattcacttgtggaattctagattcatctagaaactccatgggattttcatgcccctgagtagatatagtaatcattagtgctgctctccaaatgttcccattctctttacatgatgatgttgcacttcccaggctcttaggcatgaccacgcaatgtaaacagaagaagtatacaccaattccaggtagaaacttcaatcagaataatgtgatttggcacagcagtttccccatcagctgtggtgaccccaacatttctgatagtggcagctctaccagcctggatcgttgacaaaggatgacacagagcatagcctccagctgacccacagtgggcaataacttagtttggaggagaagtaaacatttttgtttcaagccgcagagactggggactatttgttaccaaagcattagttagcctatcctaacagataggagacaaaggcaatgtgatgaaaaaacagagtagaatttgttaatgacacagtcttgggcatcagacaaatataagttctaacctctatcacttcctagctgtgtggtcttgggactgttacttaactcctctgtgttaacttacttcaggcttctatgacaaaatgccacaggctaggtggcttaaacaacagaaacttattttctcacagttctggtggctagaagtccatcatctaagttacagatgactcagtttctagtgaggacttccttcttggcttacagagagctgctttctcactgtgtcctcacaaggtagagagagaacaagctctctactgtctattttttgaggacactaatcccattggatcagggccccacacttataattgcattttatttaattactgccttattctaaatacagccacactggggctaaaagcatcaacatggatttttaaaaggacacatacactcagtccataaaaccctctcagtcacatttcctcattggttgttttgagaaataatttaacgtatgtaaagtgcttggtctagtatctgtctctttgtaggtatttattacatttaactttattttctataaccttcccccagcaaaaaaaaaaaaatctcatcatataatatagaaaactgaaccctcttatattgtatataatcagctatcactgaagtgtcccgtctgacacttggttagggaccatctctgaaacaagagttttcctttgctgctcttaatgccctagggccaaggtccctagattactattcacttttgtactctatataagccaagtcattacaggcccgaggagcaaacgaattatacagcacagtgttaccactaaatcaacaccgtccaagaagcagtccaggacaggcaatcactctccttgggccaggctagtatgcaaatgaaaggcagagaagcaggtcaaagaggattgaatgttactgagaaagtcattgaaaatagctaactcctgattggtaaagctcctggaacagagtttcaatccttaatgtgactttgagctggagaaaaggcattacatctaaaggtacccttaacatgcatggggcaccacactgccatagcaaatcatgtgtattaaagtctttcacagtgtcaggtcttggaggaaaaaaattgccagcaagcaattttcaggctaggcaaatgagctaagttgattgtcaataaaggaggataaatagaatacacttaacttatcctctgccaagaaaattaggaccaaaacttcaccaagacaagtatttgtgaaggttcataactgtgtgtccacttggggttatagaatgacttacaagatgttgatttcttccccagtgtatattcaatgagcagcaacaaacttctcatatgtttaagttcatacagatccactgtcactatagggccagtcttatacttaggagatccacaaatatgttgtgatttatagggttctgcgaaaatctactctttcagaatacagtttatcttttgctaactagcatgttgttgggttttgaaattctgtggataaaatattattctcttcacctttgacgagaataatacattaaacaaaaccagcatcttgatgggaatttgggtcatcttttgtacagaagctggagagttcttgactgctttaggttgaataaagtctaaagtaaaaatttcaaaaatttcaaagacaatcttatctaggcttcactgaagcctagagaagacccagagaaaatgtagcctcattctccatcaactgtacttttatgtcaaaagtagatttctcatgttaactaaagactgaattctttgtaaaaaggggtaaggggtaattgtttaggaagaggaggaatatgcagaaactatttcttaacttttatttaaattttgtatattttttgtttctttgcttacaaaacatacatcactcttcataattatcccagcagcatcttgaatcttatgtgggatttatattttagcattccttggtatgtgtaaaatatttgaataggctgggcacagtggcttatgcctgtaattcaatactttgggaggtgaggtgggtggatcacctgaggtcaggagtttgagaccagcctggccaacatgctgaaaccccgcctctactaaaaatacaaaaaaattagctgagcatggtggcgggtgcctgtagtcccagctactcaggagactgaggcaggagaattgctcgaacccaggaggcagaggttgcagtgagtcgagatcatgtcactgcactccagcctgggcaacagagcgagactccatctcaaaaataaaaaaaaaaagaataaattaaacctgcaaatgagaattcagaaagtgacaagataatagccaagggtggtgtctcacacctgtaatcccagcactctgggaggccaaggcaggaggattgcttgagcccaggagtttgaaaccagccaaagcaacatagtgggaactccatctctacaaattttttttttaaattagccaggtgtggtggtgcatgcctgtagtcatagctactcaggagtctgaggcaggaggatggcccaagcccaggagtttcagactgtggtgagctatgatggcacctgcatctcagcctgagtcacaaagtgaggccctgtctaaaaaaaaaaaaggagaaaaaggaaaaaaaaaaaagggaagtgggggggacatgacaagatgattccaggttttttgttttttgtttttttgttttatgattagagacgagaaggaaaatatgaatgtgactccttctttgtggttctttcagccgcagcaactttgctttgtacactctgtctcctgccaagagagcccagggaaggtaatgtctcctggatcgtatgaaatgtttctgtaacggtcactgtaactcacaccttgatttttaccaggtcgctggcaagtgcgatggattgtaattgctgcacattcatgagggcttctcaaggttacccggtgagggttaatgttcagttcatccaccagacttatgaggcggaagagaaaatctctattagttattctgcagcattaacaaaaaattagagaacatagtctgtgctcttaaaagaagcctcgttgttctctgctaaaaggcaagagatcacacacagtaggtcatgagtgtgtgtcacgtgcagggctaaggaggagcttccctttgataatgaaacaaacatttagcttacctaagagctatgcagagtgaggacaagatgtgtcatctgcaaaacaaaaataaataaataaaggcagatttctaaaaggcacacatcattcagaattaaattaattcaattaattatgatgttttcatacaagtggaacacaggccggctaggaacaaagatttttcttccttatattaggaacaatgacctatttttctgtgtttgtggggcctgtttggtgtgggttgttttttcctaattatgttctctttttgagtttttccctgccagggcacagtgaataccaaaagaagaataagacggagagctattcctcagtgaagcagagtttacaacccttgttcattttggccaaaggccagctgactctagtttacctaacttttagagagtttcagaaaaaaaaatggaagtaatatcctgcctttgagtatggagacaaaattctaatatcataagagagttatcagaggttaaggcagttagaagggttcattcattcaacattcaacacaaactgtgaacacctaacatttgccatgtacaaagaaggacgttctgccttggactaacatccattcctgtgagggaagagaagcagcaggtattttcatactatataaaatgtatagtatatcagatataattactgtgagaataagaaaaagtgttgggtgagtggaaagtgctatttaatataaagggtggtatgggacggtctcactgagacatttaaacagaaagatcttgttattgaacaaaaggtttctgtcctccccaaattcatatgtttaaaccctaatctccaatgtatgtgatggtatttggagatggagcctttgagagttaattagggttacattaggtcataagggtagagccctcatgatagggttagagggcttataagaagaggaagagagagatcctttctcattcactctactcccgtgcatcacagaaagtccatgtggggatacagcaagaaggaggctggccatccaaaagccaggaaaagggcccttaccaggaactgaatcagctagcaccttaatcttggacttttagcctccagagctgttagaaaatacatttcggttaagccagccagtctgcaatattttgttatagtagtcctagcagactaagataggcctgaaggaggtgagagaaaagaacacgcaaataaggggaaagcatctctggcagggaaattgaaagtgcaaaggccctaagatggcagtatgtcccattttcaagggacagcagggaggtcagtgggactggagccaggtaagcaatgggtagagaagtaggagatgatttagaaagctaatgggggagggagattttatgaagccttctagaccactgtagaactgcagcagaagagtttgtggtctgactttcttaactgctgagttgagaaccaactagaggggagaaaagggcacatcaagaactcttagatgactgctttcatccaggcaagagatgggctttagagatggagacaccaggttggcatttactctggcaattagaaattatgggctatgaggcattagtaaaaatgagtaactgatattaggcagtttctaagggccagatccagggctaagcaatttacatggattatctcaattactctggtgagagaggtaccattattataatctgcagtctatagataaggaatgttctgtatcttcatttctttatatactagagaaaatagtactacctaccttacagaggtgtggtaaagatgaaatgcaatactccatgtaaatcacttagctcagtacctgacacagggtataagctcaataaaagatgacaatggttatcattttgtgatttcattaggatagataaaattttgtccacaaactacctacctgtggacatagaagactgaaaaagtcagtactcttcatcatgcacttacctcagtttcaaatcaagagaaagaattaacacaaatctgagaagcagactttctatatttaacgtaagactccttttgacaaatctttctatggtctttgcctagagcaactagcacttccctctatctgcactggcatttttctcctattcttgtttccttgtcagagctgttcctttccaatcctggcacaatgtttcttactcttctgggctaaatttcatggttctcccacacttcttagaattcccttctgcaataaagccttcccacagtgtcaccacatcctgtcctggacatcttcccggcatttcaccatgtagctactccatagctggacgttgtgcggatttcctctttttcaatgttatctgattatttcatttggagtgggctccatattcttgtagacaacactgatgcttcccccgaaccaccatgggctctctgaacctggaaatggaaagacatctttgacatttcctccatgagacacatgacaggcttattagagtgggaggtggcacacacacagcgctgccaggaattaaacgctacacccttccctttaccctgaaatggagcatcctactgggtcactcaaggtgatatgtataggcaacttagagaaacactccattaacaatgaaattaaagctttttatccagtcacttgtgtccctgggtatcacactttatcactttgtttagataaagctttattggtctaagagcaaaactaggttttgttgttgttgtcgttgttattgttgttttccctaaaaggcctggatgatgctgccgcttgaagaagaaaatctttctcctgccagagtcctgcttaaccttagctgggggaggtgatctttaacactaactattaaagtttgagcccagagactggtgctaattcaccctgaccaacctctcacacagccacagaattctcccctgcacaccagggcaccaccactgggagctgttggcaataagggagtggagaaggtagaatgtgagaggccctcagtcatccactcctctagtcagtagccttccactcataaatggataaaaacaagagccatttttagattcagcatttcctggggagaacaattccagccccaaacttcagatgtcagcagagaacagtgtgggctctttatgttcctcaagaacatgcacactgagcttcccccgcagcccccgagcactgccagctgctgctgctgcgatcccagtgtctgagtttgtgactcgccgggagattgtctgttcctgctgcttccaatatcgtcttggcctttatgaaggcacatgcacacgactgtagcggcacccctgtctccggcccattgtggacatgactgctcttccagtgtggctcccctgtgacaggcacctgctcagcaacctacagaagctcccccaggtaggtatcaatgccctaaatttcctttcaagccttcaaggctcacccaacataaatatcgcacactccttgaagagcaacttctactttcatcagataacactgatctactttcctcctaacactccttacacctgcctccaccctttgcccatattgctcccatttacctccactgggagtatcttccctttacaacttatttaaattctgtccaacgttcaagacacagcttaagtcccacctcccctgaacacctctgggatcacttcagtcctcagggttattacagttataattgctagcgtgtaatttcacaattaattttcttctccctgttttgtgtgtttgcatattatctacaaggttgtaagatacttgagaaaaagatccagatattttactactgtcaatctaattctggcgaagaggaggtgctcaactttatgaagctacaactgggccaatgccttgtagaatgttaaatagaggacaagattttgacctcagtatcagagcatacaaagataatctgacactccctctcataatccctgtgaaagtccacattctctacacagagagaaaggattaggctctctggttttgtttgctataatcttagaataattctaaccctgcactgagcaaggacaaattactcaactttcaaaattgaaagatcactcagaaattatgtaacacaaaggcagagaagaaacttgaagcccaaagaagtgaagtttcctgccccaaaccacagagtggatgaatgatagaactaggaacaaaccctaaagcttttgaaatcccagccaaaactcctgagtgaatatttgcaggttgccctccttcattttctttagagtctggatgttagcaatagaaaatcattggaaaaatactttctgagtgctttctctgcctctagctctatgctagggcatgtgggctacgaagaaaaggaaataaaaataaaatgaacctatctttgcactcaggactcctgaactccctgtattattttttaaagcaatgatcttaacttttttttttttctgaggcatagaacccactgagaatataattaaaattaaggcttagggaagtgcatgtatgcacaaaccaacaaaacactgtgcttcattttagagttttgctgagctctcatacctccaggttatagtctctttctgaaatcttcaaaaatagagtcatggttttataatttacagagtccagatgtagtcctcgcctttttctccacccttttgagtgactggtgggaaggcagcaatcacagcttcatctcttccctaaataaataagcacttccctgagtgcctcaactccattgctccagatgtcacactggatgaatggctcatttagggctcagcaggacccaggtcatgcactgagctgatcagcttttctgtgtcctgcccttgccactcagagaagtttctctgccactctgcctgcttggaaaatccacactccccttaggaggcctggaagccgaataacttctagcatggttctggcaagcctggggaagaggggaggggtctggtgccttctcttgggacttttattagacaatactggtgaaaggcccacggggtgttttaagtggtggctctggcataaaagatgcgatggaaggagcacttctctcagaagccatatatcatgaggcttctccagacaggagaaggtgggaaacagatggagacgagcaggcaaatgcaccgcagggacacagcttgagtgggagggtgtgaggaggcaactgaagctatcagcagcagcagacagagggaaaagactcacgatgtggaaccgacatatggaaagtcggagtgggaaacagaagacaggacccaacagcaagagactcattctcacaacatgtagaaccaagagatgaaccaggctccttctctggcagacaaaagaaactccgtcactgctaaagacttatttctgcacccaagaaaatgagttggcctgagaaaggttagggtaggaattccctaccctactttgcaggaggaacatggttaaaaattctaggtcttcctagagtgaactacagtcccagattgcctggaactatcccagttttatggctaaaagttctagaataatttcctatcagtcctgggcaaagtaggtcaactggtcactctatgacacccttaatgattctgatcctttagttttcaatgaaacccggaaatctgcagcactacccaggactcctggtgatcctggtgctagggaatagggaggttgctccactggggacacttataagcactgtacatttaatccccggtataacttgtcaagatgatctggaagaagaaagaataaaaaaggaagaaaagcagaaagagttgatggcttctgaaaactctaaaacagccattctccaccttttgaatcccatgggaagctttgaaaaccatggatacctgggcccttgcctggacaattacatcaggttctccggggtgaacctgaggtgaggcctcagcagtggcacaagtgagaatcattgttctgggattcctgatttcctgactgatggcatctggtggcaggcagggagctatactgagtgcctacacctgtacaaaatagcactgcaccctagctgacaggaggaacgaagtccctctttctaaagtattatttttcctccttgatgtcactgcccagcaaagaagcagtcccaggtcatgttagagttacctactcatttgtatttaaccctgcgctccaggaattacagaaaatgagtctgcaggaaacgtgtccaggtcttctccattcccaaggtaatcatgtgctctgtgtatatcctactcgaggttctaccattgaaagccaggcatgtacttctttattttctgtggctaatagaaagggggaaaaggatttctgcaaaaattgaaagaaaactaaaagattcctgtgcaggagagaagaatcaaaactggtgatagaatatgacaaagaagagaaaagaaaagggggacaggggagaagcaacacaaagggctgtttttcaggacagatcccttgaatcaatacctccccagaatacaaagacattcaacggttaaaaaccagagatcgacaagaacagttattctgcaccaaatgaaaggatatacggtatggcattgattatacccaaaggctataaggcaattgaacgttaattggcagaggcctaccaaaggtatacaatcttgaaggacctatcaggaaaaaagagaagttgctaaaactttttaaacctggacttcctttccaattccatggtttcttcagaagacaaacaactccccaggttttacaactgggaaatatagctccctacaaatggacagcagcatagtataggaacctaataaaagataataaggtgaataaaaagggtggtataatccttggcaaaatgtatagcaatatgaaaatttttgtaataaattgttataatggtttgcgttgtgaattagaatagcaaatactttgttacagagtacttacattttattttttagctatcacagctcaaaactaaatgtagacgtgtgactctatgataccttctggctaaagattgcatctttatcatcagagcaatatatatcaggttgatttattaacactctatctccaattggctctatgcaatgtgcagacaaataaacacgtaaatgaataagtaaaatatttttaaagtattcctgccctctagaaccttatactccctgataattattcttactgaaacatacagaatactattaaacgtagtgattcatacctgcagaagaaaaatatgcccttttctgtaacaggagaatgcctgaataatgatagcactgaaattgatgccatcattatcagcttgcatttttcaagcactcagtcagtgcagggcaaagaactgcagaagggactacaaacagggataaaaagcaggctctgccctaaatgagcccacagcctggatggagggagaggagggaaacatacacaaaaaaacggtaactccctggaagcatttttttaaatacccagtgagttacacagaccttaaatggtgttggatggcagtgcaatcacaagcttttacatgtgctttatggtgtctaatcacattcattatcatatttaattctcacaataacctgttgatatgagtgttaaatctccatcttacagataagaaaattgagactcagagcatttaagcagccagcctggagtcacagagatttaagtctcagagccagcactcaggatgagtgccaatggaagcctgtccttggagtccagaatgaacgtcagaagcaacccagccacagcaggagactgtccatgaatgtcatctggctgaacctaaaggcaagacctttttaacttatctcattcaagcttattcttcgtactctttcactaattccaattaagaatatttcatgctcatgataggatttgccatttttcccacttgccaagtccctgattattcatcatcatcaccagcaacaacagcagcagcagcagcagcagaaatagagaattacttgttcaagtagtaaaaccttctgtggaagtctagtgcataacaatgcataccttcccctgtctctaaccctcttgttttctaaaattaacatctctgagatatagaaagacatgcaaaggggcatggatctggtattttagctgctacaaaataagcacaaatacaataatggggcgacttcatacttaacttttgtcattataaaatctaagactgattcatggactgacatgcaggaagaaataaaattctttatctccttccaggggagaagggtttctcagtttcctgggaataagcatcattagagtaatatatatatatttttctattgtgcttcttcggttttacatttagtcaacattctctattattctgagcaatagactcttctgaaattttcatttctgtagatgatgtatattttttatcttttttctgtgtcttcattgatattttagtggaaatttgggagatgatgtatcagcagcaactagccaagcaccattttaaactaaaatccgatggaaatttaatttgattgcactacaaatgttaactccatgagattttttttcctcccatcaagtgtgtctctccttcccattaggcatatttggatagtgcaaatgggtgacttgactggaagcagaaagagattcattccattccaattttgaatatgacagttgtgaagtcaggctcatgacctgtgtgccaatttacaatctaataaaaatttaaatgcttgaattattaacagagagtgagggatggagcttagaatggaaacatttataatgaagtgacgattttcagcataatagagttgctcatttttggaacatcctatatgcatattccttgtggtttcatagcccgtaaattgtttgttgttgggtctcattttgaattctctttactatttcattctgttctgcatcagcaatcagggcagctgtggatactaacacagtttaattttttaaaaaaccatacgctttacggtcagacatacctggattcaaattctgattctgatttttacttgcattgtgagatctgatagcgtgtttcatcttgttgaccaagttagcctgcaacaactaccttgtaagctttttgtaagaattgcagtaaataagtgaaaatatttctgaccgtgcctggcatgtagtagttgttcattaatgagtataagagcttttcgccatcgttccttctttattctgccatgtaatttagaagaaagagtcctcaaagatcatgcattaattgattcaataaagcattcattcattcatgtgacatttatacagtgtcgactctaggcctgggaattctcagagctaagaatataagaaatactgagaccttcaaaaatgttatagactaatgaagaaaataggcctgttaaaaatactctatactagggaaaaatgaatgatattaaagaaagatgtttaaggtactacagtgacactaagaaaatattttcttggtgcttttgagtatgtcagttaaatcctttgagcttctaattttttaaaattagattaacaaaaacatatgagccacttcaaacatgccggtgcaaagcctacaatttctttcaaagaggctgaactacaggccattttacccaaactcatacattcattcattttaaaaagtgcatccttggaacaagcataatcaagaaatgcttaaaacgagtctggcctgtaactcatgacaaagacttgtatgaagagatgagctgagccaatctgcatcctaccaagagaaaccacaagaatcagacaattagcatcaggaaccgaaaatgaaagcatgcccagagagcagaagtcataagggatagtcaaggctcttttggttcaggagaaagctgcatgtagaaggacgcttgagttaagcagaagatggtagatgaggttagaagtaagacgaaataaggatgaagagtagaggatggggaaggcagccagagttaaggtgcagcagacacccagagagggatggggaggccaaggaaaaaagagcattacaaagagagagtgcttgcagaaatgagtaggaaacagcaacggtgggctgtccccaaactgcttgtgttccaactgatttccagttctaagccccatgtggtttctgatcctgtgtgtttttgcttaaaaacctcctacctgtattactgaataactgaatttatctatgttgagtatagccaaaatagccccttgttggttggttttgtttttgtttttgtttttttgaaatttttctaatttttttttattatactttaagttttagggtacatgtgcacaacgtgcaggtttgttacgtatgtatacatgtgccatgttggtgtgctgcacccattaactcctcatttaacattaggtatatctcctaatgctatccctctcccctcccccaaccccacaacaggccctggtgtgtgatgttccccttgctgtgtccatgtgttctcattgttcaattcccacctatgagtgagaacatgcggtgtttggttttttgtccttgcgatagtttgctgagaatgatggtttccagcttcatacatgtccctacaaagtacatgaccttatcattttttatggctgcatagtattccatggtgtatatgtgccacattttcttgatctagtctatcattgttggacatttggcttggttccaagtctttgctattgtgaatagtgttgcagtaatcatacgtgtgcgtgtgtctttatagcagcatgttttataatcctttgggtatatacccagtaatgggatggctgggtcaaatggtatttctagttctagctccctgaggaatcgccacactgacttccacaatggttgaactagtttacagtcccaccaacagtgtaaaagtgttcctatttctccacatcctctccagcacctgttgtttcctcactttttaatgattgccattctaactggtgtgagatggtatctttaatcactatgttaatataaagtatcagggccagtagtgatgatatgctgatcttcatacaaggatataaccccatcccaacaataaggaaaaggcataaagttgtgtctcctaacctagaaagacactatgctgaacaatccatactatgctgtacaaggtccttgactaaatccccaaatgatatgcactgaagtacaccagaaagccaaaataattttttatttgtacaaagctgcttagcccataattgtagacagacaattcaccataggtctttgagtttctgcagatcttgcaagcaagtcactaactgccattttgttctagcctatcttttctaaggatggttttatacaggcagttttgggagacagtatctctctccaaagcagagggcatatttgtttgtttcctttccagaataatagtggtaatatttccctctggggaaaagggcatgtttgctttcattccattacaaaagagttgggttttctaagctcaggcttctttggtgcatactcattgcatgcatagcatctagccaggcttttctctattgtctgccatagcacctgaagggcctttattatagcaagtatcatactgcatccctttccctttcttatctgatgcaaacatgaagcacctgctgcttgttctgccatgagtaatacagtccttagtctctgacctaggagtttcttgactctgccagctttaaactgcggcaggctaactttttaccttgcacatacagtaaaatctaatgtttttcatcattcttgacatgcatgtggcatctcaacatgaagcagtgttctaatcatcctaatcaattaagtcaaatggtatatgtaggacacagtattgaccacaagtattggcaatttttttcatcatggtctttctattcctacacactatgatgactattgtatacatgcttaagtataaggtataattttaccaaaatagacataaaaagttcccattttgtactttatttgggaacaataatcaaaaccaaatgtacatgtctttgacatgggcaatggtgtctctaggaattgaggagagaaaagatcaaatgtaggtattattctctaaaacagagtcccctaagtagcaacaagagcttcagatgtaatatatgtaaatattgtgtaaataaatatacatgtattgtagggtatgctctagttttgtttatttgttttttaatagggatatatagttaaaaaattgtggggcctattgtcatgtggatagccactattacatgcatccaaagacatagtttcctgtggtcttgttcatagtacctaacaacatggaaaataccaaattatccttcaaatgtcatttgtcgaggagatgttacatgtcactctaaatatgtagtttgagagtttccattctacataatatttgctcctgagtattgaatgtccaaaagctgaacttttacttagaggtgcttgggttctcagaaatacatttacatgaggtgcttacatgaagcagaatgcccaaataaccatttataatggaaaaaaaatccttttgggagctcattcgctcatattctctatcaggacccttttttcttggtattaagtataaatgatttagttacaatgcttcttgtctcaatcaaaactctgagagtggcactgacctgaaggatacttctttgggtcatggggaggtctgataaagcatccttgcctaaggcagcaggatcgctcaggtggactagatagcacatctctcaccttcccagcctcagtaccacttgttttcctatgccagttgcctcactctgtaagcattcctttctttgtttttaattactgaaatcatatgcattaattttagatatatttaaatagatagggataaagggagaaatcactaccaagaatggttaacctcagaaattttctacatatacctgtaactgcacatgaatatattccgtattacaaaatcatagatcctactgcacataacttaggttggcctgtctggttttcactaaacaatatatgatgaacattttctcattagaataagtaaataatgacatgcgttatgaatgtataatattccattataaaaatatacaatcatttgtttgttttttgagctgaaatacatgtagaaatctccaagaagcctttgctgcccactcactccttggtctgtgttatgtggccatccttcaaccccaccatagggcctttatcatagcacttatcatactgcatacctttccctttctcacctgtatacacttatgtctacttagctcactttttaaaatcttcagtagctaactagttactaactcatagggggttctctaacatatctgttgaactgaattgaataatacgattgtggttaagatgcttctacaaacattttcacacttgtccaacaatttacttgagctaaacaccttgaagtagtatgaatgagtcacacaaatacaaatcctaaaagtcctaaagctttttggtagagagacagtgattatgttagtatttctgggaaggaagaaatatcccagattcgtattcaaaaaaaattttttaataattttgccttttgccctagttaactttctggaaatgagaaaaggaagagagggtggaagaaagatctgagagaggaagaagtaaatatagacaaattcaatctcataatgtacacaatgttatgtaaaatagtcttcaaaatatccagttttacaggtccccagaacccccatagtctcttatgtccacattcaagacagttctgttaatgttgtttataaggatgtgctgctgcaatttattgtaccactttcttctgtccagagggacattacaaaacaactttttataatctccaaactggacggaaattttcttgcaaaatgatacatagtgaaaatattataaagagcctcccaggcacttgtgcctcagagtcttgtttagagaaaaaggtatcacagggaataaaattgcagtagggttgaagattttctgttcttttctttctttttttttttccgtgactaagaatgaacaagacccaggttgttcagggatgagaggtttcaccattataaccctgaaggcagcagcattactctccgtctgtgccatgcctcttccattttatgaaaatggaagattttatgaatttggcaaacattagtctgtcaagccaactgggccctaaagagatacaatcatatgtggcagcccctcccaatcctgaatcacacagcacagaacatatgataagccaataattagtctgtgaattcagttactctaagcagtccaaatgcatatttcaagctttgattacccttccatcggagattttatttttccttttcttcaattaaacaagcaactacagaaaaagcaggattttagagacctgcaacacctggatgattgcaattagatgtggcttcagaggtggggaggttgttctccacaggaatatttaccaagtatataaaacaggtaaattagaaggtggcttttaacattacaaaaatatttcctagttttagttttcctgaaaattacattgcaaaattttcttctgctataacattgctgtaaagaaaccctgcactgcagtccagtatgcctgaactgtaagataagagggttgtactctccaaagctgctttgaattcaaataatatgtgaactacactatacagagtctggtacagggatcaggcaaaattttgaagaaaagttagaaaacaggtaagcactgaagttcgttgatccctacaggatgattttcttggatttttgtagaatttttcggggacagattggttatgtcaattaatgtaacaataaacatttggctttattctcttagcaagatgttgaagagcttttccatagcaccacagtgagtaagtagaagaactcacaagcgtatttaaaaagggaaagctagaactgcaagcagccttgatggtcacccactcagcttccttaatttacagttgaagaaactgagatgcatgtaccccaaaactcacgtaaattaataataatagaaaaacccccaaaagtcaaatctcctaggtttcaggacaatcctctttcaagacacctcactatgccccagtcactgaaaaaatttttacttttgttacgattcatactgtaattttcacagacttcactgaagtatttgcatcttcatagttttgattcaattgatcaaaaactatcaagtcaactttaaatacacttgagttgcatctaacctcttaatgacatgtcttctttgcagtacttgcttgttcatcaaggatgttgctgctcatgcattggtatagatttctaagccagacggaagaggctactttgcagacatcttgtaaaagaagttcatacctcaattgaggaactgactaaggtttccagaggtttctctttgttcagaggctccagcagcatatgacttctctctgtctatccagtgatcattcaaagctctctgaggcataatagattgctcaacaagcatctctccatttgatctgaagtttctgtgtgttgtgggtgatgaactggagttgtctcattatgaaagtcttttgctgttgggttccatcctgaccaaatgtttagcaatgcaagcatgtttgccttcagatagctaaatgactgcgtgattgctaatttaatgtgtcaacttggctgggctaagggatacttagatagctgataaaacattatttcagagtatttctgtaaaggtgtttctggaagagattatcatttgaatgagtagactgagtaaagaacattaccctcactagtgggggtaggcatcatccaatctattgagggcccaagtagaacaaaaaggtggaagaagggtaaattctgtctatctgcttggtgggacatcctctcctgtccttgggcatcagtactcctagtactcaggccttcagactcagactgagacttataccactggcttttctgggtctcagggtttgaggcttggactggaactacccccactggctttcctgagcttttagcttgtagacattagatcatgggacttctcagcctccgtagtcacatgagccaatctctcataataattttctcttttattcctctctctctgtctgggtatgtgtgtgtatacatcttgtttgttctgtttctctggagaatcccaacaaatacatgctattaccaaaaaagaagaaggtttccaattatcttatgccatttctgaaagtagaattaggacaatgaatggaagttactgaagagcaccttaggctatcattaggaggaattttatagcatttaaaaacatcccaaaataaaataaactattaaattttttttctttttttgagacactcttcgctctgtcgcccaggctggagtgcagtggcacaatctcggctccctgcaagctctgcctcccgggttcatgccattctcctgcctcagcctcccgagtagctgggactacacgtgcccaacaccacgcccggctaatttttcatattttttaatagagagggggtttcactgtgttagccagaatggtctcgatttcctgacttcgtgatccacccgccttggcctcccaaagtgctgggattacaggcgtgagccaccacgcccagccataaactattaaattttaataaatgtcttatctcggagtatttaaggcagtcctggaggaccacctgtcagtgatatggagatgaaaagaagaataacacattgagaggttgcgctcaacttcctaactgtaataagtcaatagtgtatgagtttttctattttaaaaagttagatatccaatatatgaaaaagcatttgtgaatttcctttggtaaatctaaaggaagacagaggtcctggggatagaagtcaaaacagtagaagataaagtgcctttcagaatagagttttcattaatacctaagagacaaggataattcaccaaaaatcttagataatgacataaacaacttaggagtacatggcaaatttcatgacattgttcctacattctgtatgatcggggataataaggaacataattaaatggagagactgagttagagtatggaatggaccttgaaggatagatagaatttaaatggatagagaaaagtgtgtggaaataaaacatgggactgggggagggtgaattactttgtagtttctgtgtagaaactagaatacccatgctgttagagggctttggtggaagagagctaaggcagtaagaagctgtttaaggaagtatatgggaagtatatacttacctcctaattttccatcacatggcatagtgcgtatgcaggcagatgttaaaaaacccattctcgagctagttcactctctgcaatcttgatgccgagccctaggtggttttgggctttaacaaataagctggatttaagcagccatagcagcatcatatccaatttgaccttgggaactatttcctgaattccatgtgatttgaaaagcatttgtttccttaatcaaatactgccagtcctttgctgaaattgggggtctggagactgtccacctttctggatgacagcaaatggtacataagaaaccctgtcttatgtttgcatggcatgcctattgacagcagcaaggaacaactgttatctttgaaaataggacagagagggaaaggagagtaggagctattatctaggcccattcataatcattgtggtctgaagagtgggaaggacgtagagaaattggatggtgcttacaggccaagcattataatgaatgggaaacatttagcaaccaagataggcacagggaatgcagcacttagcttcccaacctccccaggatttactgaagttatgaagaagtatatgataaaaaacaatcagcgtaaattgcagacccatctttcatgctgctttaattaaaaagcctttcatcatttccagcttaaacatctcttttctcagtcttaaagtaactactgaatcttctagcgctttcacattggtagtcaggaaaatttggttttcatttccaggctgtacaaggaaagcattacatatactttccctggtaatttgaatgcatatttcttctctctctctctctctctctctctctctctctctctctctctctctctctctctctcactttattccaaagtaaggcatcttatttcaggttttcaaaaccaactaggatgtcaagcactttgaaataaaggttataagaaatgtaggtgtcaaagtagctgtgatatatactaagtggtataaatataaacaatggatgcattaggaggtacttaggatgttaggtactcaagacaacttaaaggatgttactttgaaatcttcaaaaggcagagaaaatgtgataaagttgtttgccattccttcacttgctctgcactctctttgcacatttgcattaactaacccttttgaaactctttcttccttactcctccttgtcaaaattctacccgtgctcaagtccagccatcccaccttcatgatctctaatctcactacttagtaaagaataaaacagactagttcacattaacttatactaggaatttggttcgatatcacataaaaatcacattaaaaggcatttgttgtatttttaagaaatgacaacattagtactaaaacaggcaatcacattttttatccttagatacacttagagttaaatgcctatcacagaatgctatgcaatttagcataaaataacattaacttgacctatgcatagaatgtccatgacttacttgctttttactatgattttctcatttccctttctgaaactggtgacctgcttccatcttcttgagtcagagtcttcaagagatagtagtactagtaaaattgagtgtctagtgtattgggtcttgagggattgttcccacataggcccttaccacttcttcatgagtattagcaggtactagaaagagatgccagaggcatcctgtttgttggccactttgccactcattaaggttgccgtcttattttggtgtaaccactacatgtacatcaccttccccaaaatgtcacttcttccgcctatattccagcaacagtagaccacttggattaaatgtttatttaatatatgtgattaaatatatatttaattcactgcatgtatatatgcacatatatatgcagctagcaaacagggttaaatagggtctttattttattttattttattttattttattttgttttacttttagttctgggatacaagtgcagaatgtgcaggtttgttacatagctatatatgtgccatggtggtttactgcacctatcaacccatcatctaggttttaagccccacatgcattaggtatttgtcctaatgctctccctccccttgcccaccaccccccaacaggcccgggtgtgtgatgttccccttcccgtgtccatgtgttctcactgttcgactcccacctatgagtgagaatatgtggtgtttggttttctgtgcctgtgttagtttgctgagaatgatggcatccagcttcatccatatccctgcaaaggccatgaacatgttcttttttatggctacatagtatttcatggtgtatatgtgccacattttctttatccagtctatcattgatgggcatttgggttagttccaagtctttgctattgaagagtgctgcaataaacatacatgtgcatgtgtctttatagtagaatgatttataatcctttgagtatatacccagtaatgggattgctgggtcaaatggtgtttctggttctagatccttgaggaattgccacactgtcttccacaatggttgaactaatttacactcccactaagagtgtaaaagcgttcaatagggtctttttaacacatatctccgtaatgcctctggagtagattctactcatctacaaagatcactgatggatatgagaaacctttcaaaattacaattcctttgggcccactttaactgctaagtcaaaatcctcacatctgggactcaggaatcttttagtaagctacctgttgacaggaagaacggcataactctgtgaagcaacatttgggagctgatggtttaaaagggaacatttgtgcaggttttctccacttctgtacttttgattatacttttccttcctcttagaatgcacttttttcttctccacaatatcctcctctaaaaagtttatctgctttaggttcttcttaatgaaaacataacatagtctcttaatttgaaataaagagtccttcatctgtgttttcataatacactctgtcttatttaccaaagcctgccttacttaactattttattctcacatttggtcttttccctctcctttcatgttgaaactgaaaagtctcaagataagaaatgcttccagaaattattttctcccttaaatgtattgtaaataattcccacatgcatgcttgctaaccacaacttatttaacaattcattgtgattttgtctgtcctttttggttttagactttgacaaagggatccatgtccttcttaacaggcagcagaatcttcacacattcatcttggttatctaagtattattatttgctaggtgcatttattcacattgtcaacctgcccccacccatggtactgaggccactgatgtgtggatgccactttgagaaatattggtctaaatagaatgctagagtcagaaatccagctgctgtactatcacagccacccttataagttgtctctgtttttgcttttcttttgaaatgatttactttacttttttcttgaggatcaggctgacctttctgtctaatttccctggaaatatgaagaattggagttttctttagattcctggactagtgctccaaggtcctatatgataagtccagccacctatctcagattacctttctgcgctctgggcatgggctttggccagtctgcctgttgattctgagcaattagaacctgaaattcattctctttttgtctctccagatcttgttaataatgctcttttgttggtctatttactaagctttctatttccagattagctcgtcagggaatcacttttccattctgaacttgcttctgaaccatcatgggtcacattttcccatatggaaccagcgtgaaagaagaaagagccagaatcaagtgcagagttgaacggtgtggtaaagctgacatttggaaaatggatctagcttcagcacttggctctagagacacagctacataggccaaacaccaagtccaaggaagcaccctactcatagtccctgcttcagcacaggttggcaccgacacttccaattaggcagagcttccagccaggaatgagactgactgctggtgctaaatgtgggaactctatccaaagaaagcagaactccaaaacctggcggcagagctccagaccttttcctggcaaaggcaggcagtgggctcactgacattaaagtgggcattccaggaagactctggtcctagaaaagagctggactggtaaaataaccattgagaactgaaagatgattacaaatctatagatgtattcaaaaccagatgtgagaaagcagggagtgagaatataaggaactaatataaccagagagccacagagagtagagatcctattatgggaggtaaaataagacatagaccctgcatcttgaagcatggatttgattttactgtattaaggggagaataaagctgttgaaataattgtggtttttactcaatcagaactggcccagaaacagaaaatctgaaaatataattgaggagatatttctgctagataatctaggttattctgctgccaaccagtcccaagacctcagtagcttaaaacagcaaaggtttatttgtcatccacattatttatccagcatatgttggagaggagctgatgacttcactctcaagaaccgaggctgatggagtaggtcactgttccaaagggaagctgacttctgggaggtcttaaattagtaattaatggtcatctctagaatgtatacatgacttttttgttatcgattcgctggccagaactagctactggcttcattccaaccgcaagaaaccagaactttcccaaaagtatagaaccagaaatatttagtgaacagaattattgactatttaggtctccagtttttgtagttacatatgtatttaaaagttaagaaatataaaacaaggtttcatatacaaacacaggtgcagaatttacagtaatgatgtgtaggctggttgcacaatagtgtccacagcatacatttgagattcttctacctctgccctcctcccactctacattgctgggctccagactttctgcaaagatctaatgagggcagatgcagttactgacaactacttcattccctgatcttaccaacttacctttgagtcctaatacacggtcaccatcctttttctttctctctcctcttttttttttaatttttttattattttgctatcctctccccatcttaacataaacactttaacaggtattccatatttttcttggcttcatcccagaaatattttttccctgcaacataaaaattcacctgcattttaatcataatttatctatcttggctctagccaaggtgaacactaccacatttaacctggtttgccatttggggttacacagtgcacagatacatagaaagttcaaaattaaaaagaatagtcttatttggaaattctccaggtatttacatagacagatatgtcattaacaccattatcttttaaagaagaatttgggagaacatgttgataccaaaagaatacaaacaaaaatatgtgctttgttttttaaaaatcaccataagggtctacattatttccctgaagtacaaatctaacttgctataaaggtttccaattggatatactaatttaatcaatcatatggttaaaataaacagaaaaataacaaaaatttgattgatctagggctgtttgcagcctgaatgtcaagcagacatcagtcacttggtcttacacccttaaattttcatgagactagaaatatgtaaattaactactgcacttcacagataaaaagcatgggggagaatctgcagcactaagcaatgttcataaacaaacaaaagaaagacttttgcacattttataaatttaaaaatatttgtgccgaatcagtatatgttttgttaatggtgaattattgttgttttcagtttaatagagaataaacaagggccaatttattcaatagaagttttgtattctcccaaagtcatatgagtgtcatgcacagaaaatgaggaagctgatctcagtctgccatcataacttacacaacatgaatgaattggcttaggatttttaaacaaacatcaaagaaaaagtggcatagattaaaaggtttctaacattacatcacggttcagctatgtgttttttgtttttttctgctttgaatgagactaatttagagtaaaatgtgttttttcatctgcgggataataatcaatggtatgccttctattactacacaattatatcatcaactgataatgattatgtaaagtggctaattatttttatgattacttcagaataagcattctaggaagcagtacctactcctttaaaatatataaaagtctaattttatcagccaccagcaaaaccattctttctctctcaactcttggaagtgcacctgtttatctctgccctctgagtatcttcatcaacttggtcattccccattcttcacattgacagggacccaagagaaagcctggtgggggcctgaataaaaggtgtgtatttggaaactaattaagtttgattcatctcttttggcagcactttgcatttctcttcccatgttttatttaaaacttgattgcttaaatagcaataaacaaacaactaaacagaacctggtggataattatattgaatttcacttatttatttgcaatgagatagatgatctgaagcataacacatctactctttgtgacatatgaattcacttcaaaccccagacttacgggatttctctttttcagattaagaaaacaaaattagaattttcttctctttcttcaaattgcagttttaatctcacctcctccgttatacctttcttgattacttcatccagacatgaattttttccaccttaagccacagtagtgggtcaacagttttcttacagcacttgtcacacacagcttgatgtggctgccactttagtaacacttcaacattgttcagtggcgtcagagtaagttcccattcaagcaaacccagctaatagctatgcagtaactagccctggttttcacatatggaaataggaatgatacctatttggtctatcttccacgatggttgtagcatccaaacttgaaaatgtatatcatggatccttgtaaaccatcaataatagtgcagaaatgtcacctgtgtcgtgtctcaaggagtgaaaccatgatcttattctacctctgtgctctccaaaaagactggtgctcaaccactctgctcaacgaataaatgaaagaatgtgtgattgatgcattgattgattacttagtcaatgaaaaagatagaagttcttaaggaggggtccagagaaattggtgactaaaaaggtagaaaaaaagagaggaaagtagaaaagcaaagtcaaggagtgaggaggttctgatccccactttggtattcaccattgcctactttccccattcctctgccttcctccggattctgcaaaaggtgcacccagcatcatgaacttcacttctgcaagcatttttggagttcttagaatggattacagttgacccttgaaaaatatgggttttaattttgtgagctcacttacacatggattttcttccactctgccacccaaagacaacaagaccaagccctcctccttctcctcctcctctgcctactcaacatggagacaagaaggataagacctttatcatgatccacttccacttaatggatagtaaatatattttctttctttattttcttaatagcagtttgttttctcttactttattgtaagaatttagttaaaatattaactaagaatacagtatatataaaaaagatgtgttaatggactgcttatgttatcagtaaggtttccagccaacagtaggctgtgggagtcaaaaattatatgtggactttcaactgttgggggatggcacccctaacccctgcatggttccagcgtctcctgcatttcatttaatcacctcaaaaaactgatgaagtgggcactatcattatcttgattttatagatgaggaaaatgagtcttagacaaataacttgcccaacattgtacagtgatggagttcaacaggtggatttcaaacccagcaatctgattgtccttcatataagtttgccagggctgccatacaaaataccacatgatggggtagtttaaacaacaaaattttattgtttcacagttgtaaaggctggaagtcctagatcaaggtgtccaaaggattggtttctcctgaggcctctcttcctggcttgcagatggccatcttgctgcatcctcacacataatcattcctctgtgcgctcacttccctggtgtctctgtgtgtgtccagatttcttcctctaagaacaccagtccaattggattagggctgcaaccctcatgacctcatttaactttaattacctctttcaaggatatattaacattgaaactggagctccaacatatgaattttgtggggaaacaagtcaatccataacagtgtcttttccaaacacttgcccaatgaatgagagaaggttttggccaaggtgatgggattgctggtgcttctcacacttcagtatgactgagatttactaaaatgtccattaacatcacagatatcctagtccccatacctagaaattctaactcagtaattttggggtgaggttcaaaaccgtgttcttttaacaaaaatcctcaaggcacaggatctccaaaaaatctcaaaaatacactaaagtagaagacaggtaaaacctcagaaaaggatcaatgttttctctgaaatccatggttactattttttgaatcactattttagtttacctgtgtgatctatctggaagaaagtatgatctccttatgagtcgttttcatcatttaatcaaatatcaggccagtttttgtttgtttgttaattttcttgcccaagctgtgaaaaacaaaaactgtttttatctttattttccacaaattcatctttttaaggttttcttttttgggaaagactctgctttctcaggttatttttttgactctactcaactattcatgaatacaatggaaatctccaatgatatcatttctccccaactttcatgttgacttacatttccaacctgttttttccttattactcttaatgatatcctatgcagtaggaccttatttttataattttctgaaggatgaaatcatcagtaatagaaatcagttctttcaaatgaatagcttttagttaaatggcatttcgtggaatctccagttagctgaaattatcaactctgaatatattccatctctttatcacctctgtaaatgcaactgggaaaatctcaatacttcttcaagcggcttcatgaaaatcctgacctgagttttgaactacagcagggagatttggataaggatatgatcaaaacttggggaagcctcatcttaagccaaaaactcactgaagaaaattcccctttaaggttgggaccagtagaaaggtggtactggtcatagctgtgcctcaagcaccgtcccatccttactcatgtgcatcaaaggaggccactcatgagactagaacaccaggtagcagcatcaatatcaaaaagcaccatggatttacatgttggtcctctatgactgttagtaggaaaacagcttggtaagcaaaaccagcgtcaagtgcaaagttctgcaaactgtggcctgtgggccaaaatctgactactgcctgcttttatacataaagtatgattcgaacacagcctcactcatttgtttatgttttgcctatggcttctctcacactacactggcagaattgagtcgttgtggcagagactgtataaccacaaagtctaaaatatttaccatctggccctttgtagcaagtttgccagccactcatctagagtaagctcctccagacatataaaatatgcatatcagtagcagtaggataaaagaagatgttcacagagaaaaaaaaaaaaaaaaaaaagctgctctccgaagctctgaatttcctacaatgggctggaggtcacaagcaggaatgtggacatactttgtagggtttccgtgctactaaaattcagctcacccctattctccatcacagctccaatcaagaactaatagttttacatcagaaataggtttgaatggcccaaaagcctggctccctgcaggatcggcttcaattccctgatgtctgtccaaccctgcagggctgcctagactctcaggcgccaccttccctgctcagggtcatttagctcctcctggccccagttctaacaaagaggccactgacctgagtcatttagttcaattgctgacaggaatcccattatctgagtgccacttcccattgcggcctctagatacaggcacacagctttgcactcatgattaacgtgggggatgagtggtcacgtacactcaccaatggggagttcacggggagaaagaggcttttacgtgcattaaatctgcactcaaggccagactctggacacattttttgtttttatttgtttgtttctttttgtttgtttgtttgttttcgtttctctctgacaatcactgagtttcttctgtgctcattcactgtgacctgaaggggagcctcaggcataggaactgctcctggcagcacagctgcttagactgtatattgcatcagctgtgaacttttgtggactagaatgataaataagagccttctgtgagtaacatcatgaaatcaagcctgtttcactaataaactggctaatgtttattgattggatggtaaatacgtaacagaaacctaacaatcaaaaatacattacaaaagagggagaaagaaggaatgagcactttggaaagtgtctgaggacattggttttggaaaatcaacctgggggtagagttaatgcagcacactaagatcaaaataccctctgcccaagggcatcaactggtaaatcagatctctgacctcactcaggagtacccttctgaccctgcaggacatcaatttctaaaacacagtgacactcagtagtacacatatcctaccctttggccaaagcctgaattacatagttcatcaaatgtctgatagcaaaagagctttcgttttacttaaaaaaattttttttgtatgctaaatgtaaaaaaggccaaacaagaccctcatgccttgtttatgggtcctgaggatcataccccagtccaaatagacactatcacttatttagtaagaggttacattgactactgtgaatgagggaagatcactgtgggccatgtgtgaaggctctttgggtttgtgcaaacccatgataaagatgggacaatggcaacaatgatgacaatgataattaacagttattaaccatgcctctgtgatagattcgttgctaagggttttacctgtgtagcctagtgcaatacttacaaccacccttcaagataaatactataagtaactcccaaattacggagtggtagctaaggtcaccacgatgctatgtcctaactattttgtctctaagtcacctttcctaaggcctttctttgtcgtgaaaatattgacaatattttcttttttattattattatactttaagttttagggtacatgtgcacaacgtgcaggttttttacatatgtatacatgtgccatgttgttatgctgcacccattaactcatcatttagcattaggtatatctcctaatgctatccttccaccctccccccaacccacaacagtccctggtgtgtgatgttccccttcctgtgtccatgtgttctcattgttcaattcccacctatgagtgagaatattttcatgtaaaatgccagaaataatgtgcagaagagaaaatttttgaatgttgccttagcaccctatggaaatttaatctgtaatttcttacttttccattaacattccaaatgtaccccaggaataagactcttggtacatccagagagaagtccatttcctatctttagctatgtgattaataattataaaagtatcaagagagaaagtttcatcagctctggaaggtttaaagcattcctatctgaggacttagaaatgtgttctcacaggatctctgataagatggaatcaagagcttgatatgttttacttttttaattttgatttttttcagacagtgtctcgctctgtcacccaggctggagtgctgtctgtgaaatggaaattataacaggcctcttggcaggcctccgtgtgacaaataacaatcttaacacaaagactagcacatagtacacactcacttaaccatagccattaatgtaactgggagttattatatttcacatttacggtctgacacagcattatgtgtttcctgttttctaatatgtgaagtatacatgcaggaattctggtttaaccagtcaagagtttgttgttttattttttggaatcattctaatatgtccaaagtatttttatcccttagtgagttcaatatataattgaatttttctttttctttttttttgagacagagtttcttgtctcctaggctggagtacaatggtgcaatcttggctcactgcaacttcccctgggttcaagtgattctcctgtctcagcctcctgagtagctgggattacaggtgcctgccaacatgccaggctaatttttatatttttagtagagacgggatttcactatgttggccaagctggtctcgaactcctgacctcaggcgatctgcccgcctcggcctcccaaagtgctgggattacaagcattgaatttttcttttattattgagtttcccacaagactttagggacattcatttgagcttcatttctttttgttgctcactgaagaaggagattttggacacagaagattaggttcgactgtcttccaacccaatccataactataaaatttcacttttctaattgaaagctcaacatggattgatctcatttgaaataattcaggacttatttaagaagctcttcatatgttttaaggctttcctgatgctatgatttctaataataataaatattataccaactttctgcctggcaaaacccggagtttaggttgatacttttctcctcaattaataaatggagagaatattcaaaacaagccattaaaattgggcaaaaaataacaatctctttcctaatcagcatgttgctctccacaagaatttaagaatccctgtggattacctctgtagaccacgggatgtaatttgttatagcagtggttctcaagcttaagtgtacatccgaatcactgggaaagcttgtcaaaaaatggatttctgggactcactcccagatttctgatctggtaggctgggtgaggctttgtatttctaacagtttcccagatatgctgacactgctggtccagggactacatatttttattgatatactagagttgttcatattttgggatacatgtgatattttgatacatgtatacaatgtataatgattttgtcagggtaattggaatatttattgcctcaaacatttatcttttctttgtgttggaaacattataattctcatgtaattattttggaatatacaaaaaattatcattaactataatttccctactatactgtcaaatactagactatatttcttctatctaactgtattttggtaccccttaatcaccttctcttcatatacccacccttccttttccagccaaggacaacattttgagaaaatcagtattctttgaggaagtcaaattttctcacctctgcagggtatatctttcacaagaaagatcccattactaaccaagtgggctttgtttttaaataacagctttttccctcatcctttcaaatctgagcattcctcaagattcattctttatacgtttttattttccttctcttttgcagagaagtcttcagtctttcgtgttcatctctatgcaactggctctcaagtctgtttgttaaattttttcatttttattttttatttttttagagacaaggtctcactttgttgtccagtctggagtgcagtggcatgatcatagctcactctaacctcaaactcctgggctcaagctccttccacctcagcctcctgagtagctaggacaacaagtgccaccaagtctgtttattttttttataatttcttgtagagacagtgtctcattacgtttcccagacttcatgtatcttcctaataccttcatttccctttgaatctaggtccagaattccacatcttttccttcaacaagaacttgtggaacaaatgaataagtggatgaataaatagatggacgagtggatatgtaatgcccctagggctaactaaagaaccagaaagcttctagttaaaattctcttggctctaagtctcagtcttttatcccaattaatggtagaaagataattctctatgatattttatgaaaataaggttaagagaaaagaggtggggaagagtaaaactgtactgcaattgctaaaattgtttagaagatttgggaaataagcaggcctgtaactaaaaactagtcacaatgggatacggacgagctgtagtaaactatgatttgtctgtatgccttttcctagcaataacctttgactcccaacatcagctattcttcatgtgaaccacctaccatataaagcatgatttttcaaatttatgctacttccaaatcctttccaagttcagacaaactttaaaagtaactcatgcctatagtctacagtgtcaaaccacctgagttttttattcagtaggtctgggttgggtcccaagagtttccatttaaacaaatttttagctacttttgatgctgccagtatgaggacaataaacagggtatcacagctcctggagactggatggtagctgtactacattactacaataataatgctaattacaagaattgagaagtagcctagccacatctgaatgacactagaaaattttctaaagaaaaagataagaatcaggttcaactattggaatggaagaacaaagatctctgaaaacctacccttccataacaataacagggatattggccccaaaaaaacctcaaaaaaaaacctgtcaaaatcaactttttaaaaattctggaaagtatgcaaaagtctgccacaatctgagaagtgtttagttaaaaaaaaaaaaagaaaaaaagttgaatcctataaaaacaataagctttgtgatggtttagtatgtccaaattttatctccctttccagctctttagtgaccttgaaaaccaacattcttgcaactatggtagactatgagccattggaagaggtagaactgaatttagcccatcacatccatcacatgcctcattcccaaagaatgttcactatttatgacagctcactgtctttatttgaccagactcagagttagcttagtgcaaacagccatactagaagggcatttatagaaaaaataaataatgacaactgattaacattatagctgcctgatgcagcattgccagttgaggataagaggctgatttttttttaaagcactgaaaagtgaaatatccataggaaactttgcaaagctttcacatattcctgggaattagaagtcattcatgtatgcagggctgtgctcatggcctatatcaggtaagatttgagtagacactaagctctcattgctatcagaccttaaggctgtagacagcaaaaagagaagtctaaggcagggttttaaactgcctaccaaagcactgaaatgtacccaacacatattggttcaaagcatttaagatgttctctaaccaatcattaactgaccaagaaggtaaccaaatagaaatatcatagaccacacacaacaaagaatacagactttacataatagtccagataagtcaataaacgaacaaacagcagtaacaacaagcccaggtgtgtgggggtgatcatcttctttctataatttaaaaattacatcattttaaatgtccagttttcaataataaagatgagacactcaaagaaacaagaaaataggcctatacatatgagaaaagtcaatagaaatggtccctgagaaagcctagatgtcagacttactagataaagaactgacattcactattagaaatatattcaaataactaaaggaaaccttgtgtaaagaagtaaaggatgagaatgattccctatgtgaacccccaaatatctgagacaggtctcagtcaatttaggaagtttattttgccaaagttaaggatgtcccccatgacatagcctcaggaggtcctcatgacatgtgcccaaagtggttggagcacagcttggttttatacattttagggagatatgagacatcaatcaatatatgtaagatgtacattggtttggtccagaaaggcaggacaactcaaagcagggaggggtcttccaggtcataaatagataagagacaaatggttgcattctcttgagtttctgattagcctttcttaaggagacagtcagatacgcatttatctcagtgagcagaggggtgactttgagttctgattgtcctttgtctacaaggaaattccttgtgagggaggtatgtagcttttttatcttagtagctatcgtttttaggaatagaatgggaggcaggttgtccctaagcagctcccagcttgacttttccctttggcttagtgattttggggttccaagatgtattttcctctcatagctgctatatagagaatatcaataaagagttagaaattatttaaaataatcaaatggaaagttaaaaagtacaataactgaaattaaaaaattccctagagcagttcagctgcagatgcgaactgtcgaaaagaaaaaatcggttaacttgaagaaaaatcaattgagagtatccagtctgaaggtcaaaaagaaaatataagaaaaataaataagtagagcttcagaaatctgtagaacctcatcaggcacactattttacacatattcagagtgccagaatgaggggcaagagaaaaaggggtataaaaatatttgaggacataatggtcaaaaacttaccaaattttatgacaaacattaatctacatatccaattagttcaatgaacaccgtgtagaataaactaaggagatccacactgagacacattacagtcaaactgttgaaaaataaagacccttgaaagcagcatgagaaaagcaagtcatcatgtgtaatcagtactcagtgagattaacaaaagacttctcagcagaaaccatgaaaagaaaaacactatcaactaagacttctgtgtctagcaaaactatttttcaaaaataatagagaaattaagacacagagaaaactgagagaatttaccactagcagtataaaaaatattaaaggagatccctagggctaatatgaaaggtcactaaacagtaacttgaatccttataaagaaaaatgaatactccggggatagatatgccattccccataatgtgcttatttcataccgtacatatgcccatatcaaaacatctcatgtaccccataaatatatacacttacagtatacccacaaatttgtttttaattttaaaaagaaaaactgaacaccattaaatgcaaaaataaaaataatataaatatatatttttttaaaacacttttcttctcctattcaatatgagacagctacacaactcaataattgtcaattatgtaaaagggcttataatgcataaagatgtattttggatgcaaatagcacaaacataccatgagaaagagttatgtcagagcaaatatttgtatactatttattataaattaagtttttattagtctaaaccacattgctttaaattagatgttaattataaaccctagggaaatcactaagaaacagttcaagaacaaatgttaaagtaaatcacagggaaattaaaatgatatactagaaaatatctaacagaaaacaaaccagtaatgataaaatcgaaaaactaaaaaaaacccagatgtaagccatataaagcaagtaaaacatcagacataatgactaccctatccataattaagttaaaagtaaattaaattgacactttattcaaaagaaaataaatatatttattgaatatataccttttaaaaagtaaattaaaattaaatttaaaagaattaacaagaaacagattccaatatatgttatacactgtccacaagagaaaaacttcaaattcagagacacaaacaggttaaaactaaaatgctaggaaaaaagatatatgattcattagtacccaaatagccatgcagtggctataataacatcagacaaaatatactttaagacaaattgttactagaggcaaaaaagaacatcttataataataaaatagtctattatttaagacataaaaattataaacctatatccacctagcaaaagagtccaaaaatgccttaaggaaaaacagaactgaaagaagaaatagacagctgaataacaatagttggagaactcagtacttcactttcaataatggatggaataactggcagaagatcagcaaagatgtggaaaagttgaacaacattataaatgaactattaatataaacctcatagatagatgtaaaacattctacccaaaaactgcaaaatacgcaatagtcccctttatctgcaggggatgtgtctcaagactcccagtggttgcctgaaactgataatactactggaccttatatatgttgtgtttttctcctatatgtacatgcctatgatgaagtttaatttataaattaggcacagtaaaagattatcaataatgactaataaaatagaacaattataacaatatattgtagtaaaagttatataaatatggtctctctctctgtctctctctctctgtctctctaaatatcatactgcatcataggtaactgaaacttcagagagtgaaactgtgggtaggcaaactactatacattcttctcaatgcatttggaacattattcaacttaaaccatatataggccatagaacaggcctcaataaaactttataatgattaaaccttccaaaaagtatgctttctcatcaaaaataaaattagaaatcaatcacaaaattcacaaacatatggaaattacacagcacagtgttaaataatggatagtaaaagaaattgcttaaatgattaaatacttggagatgagtaaaaatgaaaatacagcatactgaaagttatgggatgcagccaaagcagtacttagaagataatttatagctataaatgcctatatttaaaaagaagaaaaatctaaaattaataacctaacatttcactttaacaaaaaaagaaaaacaggaaaattcaacccaaagaaatcagaagtaaagatataataaaaactaaagcataaataaagaaaacattattggatctaaggatgggaaatgttcttaatgtcttcatacaaaggaaaaaacctaacaaactagacaataaaattttatggatttcattactttaaaatttagagtttatattaaacaaattacaactctaaacaaaagtaatagagatatgagattggaagaagatatttgcaatccataaaactcacaagagtatcacctagaactaaactgttcaatacatagtcactggtcacatatggttatttacatttgaatttaaatcaattacatagaattatatttcagtccctcaactgaactaaccatattttaagtactccctagccagatggctggggggaccatgttaaacagtttgatatagaacatttccataatcagagaaagctctatgaaacagacctaatctagaatatatcacaaacttataaaaattaactacaaaaaccaggaaactcaaaataaacgtgagtaaaaatataaataaacatgtcataggaggaaaagtctaactggttatcaagatttccacatatgccttagtaggaatcagagagaagaaaattaaaagcaatgagatgccaggttagacccatttgactaacaaaaatctaaaagtagggttttagcaaattttggtgaaaactacaagaaatgagaaacttcattgagtgttgatgggggtgtaattaacatagttgttgtggaaagcatcagcaacatttagtaaaattaagaatagatatcctagcattcacacacctggttgtatatatcagagaaattctcatccaaactgatacgatacaaacagtcacagtcctggatgcttaatctattatttttgagctagttcagtaggtctgttattttgagctagttccgtagaatttactagaattcttgctctttccttctgtttctaacaaattttactcacatacagttgctttcaggatatactgaaagcaaaagtcttgccctgatttctgaataaatgtaaaaaaaaaaaagggcaatagtgtacattggtaacaccaaaagcagaactcaagtgtttaagaacagtcaccaagtacatggttgtcataaactttgggtccataggcaggatatgaatatggggatggtaaaattatattctacctttctttgtgacagcagatctactgtttttcttgtcccctccctccccaatcaagtgaatattagtatttttatttgccgattcaccaagccaactctagcagccttgtacttggaggtaattcttctattcctgttattctttgcttttggatttgttattgtaagctttttaaaatatatatacaaatttcatgcatggacacttcattgaaaactgagaaatactataacaagagctgccaggtaggcactatttgaaacctatttcaaactatttgaaacaacacaacatgcagggcaactcggtttgacttaaaagcacaacttctaaagtccaaaaattcctccacattcaggccccacaatgggcatgagagaaaaggctgagcagctgtggaacacctcactctgggaagatttaatctagtgtttggaatctgataatctagtggaaatatggtccttgggctcagtggaaatgtcaagcatagagatggtacttttagtattgtggcagatagaattctaatataacctcataattcctgccccctagtatcccctacccttgaatgtggatatgatttgtaacttgattatatttctttccctgtctcagaactttatttttttaaagaactctattgagatatcattcatgaaccatgtagtttatacacttaaggtatacaggtcaaaggttttaagtatatttatgaattataatttgcttctaaccaatagaatatggcaaagatgaaggaatttttcagatttaattaagatgcctaatcacttgactttaatcaaaagggaaattatcctatgtgggcctgacttaatcagttgagccctttaaaaaagaatctagaggtgaaagactcagctgcagagactccctctttcctcctggctctgaagttccatgcatgctataaccacaagaaaatgaattctgtcaacaacctgagagaatatggaagagggtgccaagggtcaggtgagactgcagccctggctgacaatttgtttttatttttatttttatttttgcaatggattcttgctctgtcacccaggctggagtggagtggtgtgatctaggctcactgcaatctccacctcctgggttcaagcgattctcctgtctcagcctcccaagtagctgggattacaggtgtgcaccaccacacccagctaatttttgtatttgtattagagacatggtttcatcatgttgaccaggtggatcttgaactcctgacctcaagtgatctgcccacctcagcctcccaaagtgctgggattacaggtcctagccactgtgacaggcttgttattgtttttttccccatttttcattgacacagagtaattgtatatatttatgggatacacagcgatgttattatatgtgtataccatgtattctgatcaaatcagggtaataagtatattcatcttcttttatctttgtgagagtacccagttatgctgttcccagaatcctgaattatggaaactgtgtgataataaatgagtgttgttttatgctgctaagttgtggtaatttgttacataacaataaaaaacttacataagcattgtggatgggtcatctgtctttggcagccaggaggcaaaaagacatagaggattactcctcagaagaatactgaaagaggaggcatactcaacagagatggtgtcatctttataaaagaagatcaagaacgatgtcacagaattgaaggagaaaagagacccaaaggagaagggtggttaagttcaacatgctgcaaaaatatcaagaggaatgcaaactagaactgacaaaggcattacaagaaaggtcattgatactttacagagtccaaaggctttaacaaccaattcctagtcaaaaagaatcatggcatctgaagctctcagcttgaacagcagcagcggcctgaagttcagagtaacaatcaaactcacaagacagaaaaagctatacccagagccaactttatttagctttcagaaaggatacatgtaggaggaccacaactcaacatgcagggcaacttggtttgacttaaaagcgcagcttctaaagtccaaaaattcctccacattcaggccccacaatgggcatgagagaaaaggctgagcagctatggaccacctcactctggaaagatttaaattctggggtcttttcagtttttctaccttactagtcatgtatctcctcaagggcatcctactggtgcatagtcttatgcagctgtcttagggcagctgaatatcatcagtatcagttactgattactcaataaatcatgttgacaaggagttaaaggtgcttatccgttgcatagtcaccttggttagggtctcatttattttaaatctgctatacttttatcaaatctttgagttaatgttgcaagaatgatttgaccaaggaaaaaatcttggggctataggaaacatcacatatcaacctttcaagcagaggaaacacagccataactcagtgtctgagtgctttctctagagtctgcactccactcactcacactgcagtaaatttttccaatgttgtttattctatatcgatatcatgttccatctctctgatgtctcctcaactctatgatttcagcaaggtaaccactctgagctgagaagcccatcttcatttataggaccttcttttgtaccataccatctcacacagcctgcacttatagtgcatttacagtagtcagtgtctttgcttcaaccctggactcatttatttattccgtcccaatgtataaccctgacctccagctgcttcaggatggtcaagtttgtaaaactagtaggaaccatattgcaaatgttgcctaatgggaagaaataatattacagtctattagagttgccaactttgcaaaactgcttactgaccactggagattcttagactttacactaaaaagctacatgattattttatgtcaatcccattttacaaccaggaattgtaagtaacatacaatgtaggggataattctggtaggtggtaaggtgaggctgccttcaaaccaatttgggggagcagatttttgactaatcccaagaactaagatgagaaatcacagatcttattttctggttttttttctctccccatatgcaacttcacacacatgtacataaacactacatgcattatccccacacacctacaacatacacacaatatcctacttatctatcctgtaagttacctgtcatgctcttaccctctccatagtaccctctagcaatgaagaggaagaaggaggaggaggaggagggcagaatagaccttcctcaacttatgccattgtcagataggaggattctggatctaaggatacaccagatagtcaatgaattttccaggtataccgcagactgaaagacagctttccacggagaaaacacagaaaaggatagtcttacccacatgaacagaaaagcctgacaaagggttgtatccatctcaatcctgctaccttaaggaaatgctcctggcctaacaaaagtatgccaaaacatgtatgtgtacagttttctgtgcaaaacatagtgttcaggatgtcatttgttatgaatctattttaacccactagcacactgctgtatctttgttctttctgctctaactcctgacttcaggtattggactttgagtttttgtctggacttcccagactgtcatcacaggtaattgacttctcagacttggaactattcagttccatcctgcagtcagtggatgattcctactctctaacctggcatctctgcctgactctgagaatccgtcccatcttcttccattaagatagtatatggcttgagattctaaaacatccacttcttcctccatgcccaaagtacagccttagagcctggacctttgacatgtggtgaactttgagaaagtgattttcacagagaacataaagaataaatttattattattattattattattattataatactttaagttttagggtacatgtacacaatgtgcaggttagttacatatgtatacatgtgccatgctggtgtgctgcacccattaactcgtcatttagcattaggtatatctcctaatgctatccctcccccctcccctcaccccacaagagtccccagagtgtgatgttcccctttctgtgtccatgtgctctcattgttcaattcccacctatgagtgagaacatgcggtatttggttttttgtccttgcgatagtttgctgagaatgatgatttccaatttcatccatgtccctacaaaggacatgaactcatcatttttatgcatagtattccatggtgtaaatgtgccacattttcttaatccagtctatcactgttggacatttggattggttccaagtctttgctattgtgaatagtgccgcaataaacatatgtgtgcatgtgtctttatagcagcatgatttagagtcctttgggtatatacccagtaatgggatggctgggtcaaatggtatttctagttctagatccctgaggaatcgccacactgacttccacaatggttgaactagtttacagtcccaccaacagtgtaaaagtgttcctatttctccacatcctctccagcactgttgtttcctgactttttgatgattgccattctaactggtgtgagatggtatctcattgtggttttgatttgcatttctctgatggtcagtgatggtgagcattttttcatgtgttttttggctgcataaatgtcttcttttgagaagtgtctgttcatgtcctttgcccactttttgttggggttgtttgtttctttcttgtaaatttgtttgagttcattgtagattctggatattagccctttgtcagatgagtagattgcgaaaattttctcccattttgtaggttgcctgttcagtctgatggtagtttcttttgctgtgcagaagcactttagtttaattacatcccatttgtcaattttgtcttttgttgccattgcttttggtgttttagacatgaagtccttgcccatgcctatgtcctgaatggtaatgcctaggcttttttctagggtttttatggttttaggtctaacatttaagtctttaatccatcttgaattaatttttgtataaggtgtaaggaagggatccagtttcacctttctacatatggctagccagttttcccagcaccatttattaaatagggaatcctttccccattgcttgtttttctcaggtttgtcaaagatcagatagttgtagatatgcggcattatttctgagggctctgttctgttccattgatctatatctctgttttggtaccagtaccatgctgttttggttactgtagccttgtagtatagtttgaagtcaggtagcgtgatgcctccagctttgttcttttggcttaggattgacttggtgatgcgggctcttttttggttccatatgaactttaaagtagtttttttccaattctgtgaagaaagtcattggtagcttgatggggatggcattgaatctatatattaccttgggcagtatggccattgtcacaatattgattcttcctacccatgagcatggaatgttcttccatgtctttgtatcctcttttatttcattgagcagtggtttgtagttctccttgaagaggtccttcacatcccttgtaagttggattcctaggtattttattctctttgaagcaattgtgaatgggagttcactcatgatttggccctctgtttgtctgttattggtgtataagaatgcttgtgatttttgtacattgattttgtatcctgagactttgctgaagttgcttatcagcttaaggagattttgggctgagacaatggggttttctagatatacaatcatgtcatctgcaaacagggacaatttgacttcctcttttcctaattgaataccctttatttccttctcctgcctaattgccctggccagaacttccaacactatgttgaataggagtggtgagagagggcatccctgtcttgtgccagttttcaaagggaatgcttccagtttttgcccattcagtatgatattggctgtgggtttgtcatagatagctctttttattttgagatttgtcccatcaatacctaatttattgagagtttttagcatgaagagttggtgaattttgtcaaagttcttttctgcatctattgagataatcgtgtggtttgtctttggttcagtttatatgctggattacatttattgatttgtgtatattgaaccagccttgcatcccagggatgaagcccacttgatcatggtggataagctttttgatgagctgctggattcggtttgccagtattttattgaggatttttgcatcaatgttcatcaaggatattggtctaaaattctcttttttggttgtgtctctgcccggctttggtatcaggatgatgctggcctcataaaatgagttagggaggattccctctttttctattgattggaatagtttcagaaggaatggtaccagttcttccttgtacctctggtagaatttggctgtgaatccatctggtcctggactctttttggttagtaagctattgattattgccacaatttcagatcctgttattggcctactcagaggtttaacttcttcctggttttgtcttgggagagtgtacgtgttgaggaatttatccatttcttctagattttctagtttatttgcttagagttgtttctggtattctcagatggtagtttgtatttctgtgggatcggtggtgatatcccctttatcattttttatcgcgtctatttgattcttctctctttttttctttattagtcttgctagcggtctatcaattttgatgatcctttcaaaaaaccagctcctggattcattaattttttgaagggttttttgtgtctctatttccttcagttctgctctgattttagttatttcttgccttctgctagcttttgaatgtgtttgctcttgcttttctagttcttttaattgtgatgttagggtgtcaattttggatctttcctgctttctgttgtgggcatttagtgctataaatttccaaagtcgaaatgaaggaaaaaatgttaagggcagccagagagaaaggtcgggttacccacaaagggaagcccatcagactaacaacagatctctcagcagaatctctacaaaccagaagagagtgggggccaatattcaacattcttaaagaaaagaattttcaacccagaatttcacatccagccaaactaagcttcataagtgaaggagaaataaaatactttacagacaagcaactgctgagagattttgtcaccaccaggcctgctctaaaagagctcctgaaggaaacactaaacatggaaaggaacaaccagttccagctgctgcaaaatcatgccaaaatgtaaagactatcaagactaggaagaaactgcatcaactaacgagcaaaataaccagctaacatcataatgacagaatcaaattcacacataacaatattatctttaaatataaatggactaaatgctccaattaaaagacacagactggcaaattggataaagagtcaagacccatcagtgtgctgtattcaggaaacccatctcacatgcaagacacacataggctcaaaataaaaggatggaggaagatctaccaagcaaatggaaaacaaaaaaaggcaggggttgcaatcctagtctctgataaaacagactttaaaccaacaaagatcaaaagagacaaagaaggccattacagaatggtaaagggatgaattcaacaagaagagctaactatccgaaatatatatgcacccaatacaggagcacccagattcataaagcaagtccttagagaccaacaaagagacttagactcccacataataataatgggagactttaacaccccactgtcaacattagacagatcaacgagacagaaagttaacaaggatacccaggaattgaactcagctctgcaccaagcagacctaatagacatctacagaactctccaccccaaatcaacagagtatacatttttttcagcaccacaccacacctattccaaaattgaccacatagttggaagtaaagctctcctcagcaaatgtaaaagaacagaaattataacaaactgtctctcagaccacagtgcaatcaaactagaactcaggattaagaaactcactcaaaaccgctcaactacatggaaactgaacaacctgctcctgaatgactactgggtacataacgaaatgaaggcagaaataaagatgttctttgaagccaacgagaacaaagacacagcataccagaatctctgggacacattcaaagcagtgtgtagagggaaatttatagcacaaagaataaattgagaaggagaaactggatggtgaagggattagaaggcacggatatgagccacctgttctattaatgacagaatggcatgaaaaggaaatgagcattagtggtgatagtagcagcttccatttaggtggttactttaggtcaaccactcttttagtaaattttatttaattcttacaataacactttggaatatattttgtcaattacattttacaaatgatgaaactagagctaaaaactcttaatttgtcttaagtctttcagctaacaagtgtcagggtcaaagttttgttcctcaatccttccatcccccaacctctggtaaccacagatttactctctgttttgagaggtgtttattatcattgttgtcatttgcttttttgcaggggtggctggggagggggtggttctgggaaaaaatggaaaatctgctagacaaatttgaaaagagctgcaattcttactctctacttttatgagtttggctcatttagagtctatatacagtgagatcatgcagtatttatctttttgtgcctgtcttatttaacttaatgtaatgtcctctagcttcattcttgttgttgcaaatgatagaattttcctcttcttccttttttgtggctgaatagtattccactctgtatatatactccattttcttcattcagtcactcattgacagacacttaggttgattttgaatattagttactttgaatagtgctgcaataatcatgggagtgtgaatacctctttgacatattcatttcatttctttggatatatacctagaagtggaattgctgagtcacatagtagttctatttttaattttttgaggaactgtcatactgtttaacataatgattatagtaattttcatttccaccaatagtgtgcaagggttcccttatctctacatcctcaccaacacttgtcatttttcatatttttgataatagctggtattataacaggtatgaggtgatatctcattgttactttaatttgcatatcctgatgattaatgatgttgagcaatttttcacaaaactattggccatttgtatgtcttttttgagaaatctctattgaagttccttgtctattttaatcagattgttttcttactattgagctgaattcatatatatatatatatatatatatatatatatatatataagctttttagtttgatataattctatttatctattttgcagagtcaagatttgaactcaggcatgcggtttttttagagttgataacattgacaaccagcataactaaattttcatatatataaaatttaggaaaacagccagtatggttaagcaaggttttgccaaacatggaagttatttctgaaaagctactccctttctcatccctccattttgtttataataaaattgagggcaacaactaggtttctctcatccctgagttacaatctaaggctagttttacgactaataaattctacattctaagaatggtaagggaattaagcatgaacctcataagcttattagacttatagactatgaaagtgggcctgaggatcaaaaaacgaggagtaatgagacaaaatagaaatccctaagtatattgttaaaaacactagctcaatgagttatcaaacgctcatacacaccctcacaaataatatatactatatcccccataaacataataattccttggtaattttataaaattctatagtatagaaaactgttttaaaacttttgttgtctaaaaatgttctcggattctctacagatgctcccgttgagtaggaccttgagttgtggcaggctttgcaacgtttttgccaattaaatattatgaaaatgatgttatgcagcatctgggccagaatccacaaggtcttctcctctcatcctcttgaacccctataataccagatgcaaaagctaggctagtctctctgagggtgagagatcacacagaaagggaggcccagctgttagacagcattaaccaccacacaggggagtgaggccatcttagaccatccagccccagccaagccaccagatgactgtaccatacgaatggccatagacaagaccagtgaggaatttcccacctggcccggcccaagttgctgattcacagaattttgagcaaatacacaatgtattgtttgacaccaccaagttttggggcagtttgttacatagcaataggtaactgatataacttactttcaaccatcactccctgttgtggtttagatgtgtgtcctctccaaacctcaggttgaaaagtgatcctcagtgttggaaatggggcctaatgggaggtattggatcatggcaataggtccctcatgaatggcttcttgccatccctttggttatgagtgagttctctctgtgagttcacatgagatctggttgtttaaaagaatgtggcacctccaccactccgtcttgctcctgctcttgccacatgacatgcctgctcccctttggccttctgccatgtttgtaagattcctgagacccataccaagagcagatgccagtgcagtgcttcctgtacagcctgaagaatgatgagccaattaaacctcttttctttataaattacccaacctctattagttctttatagtgatgcaagaataaactaatacactcccaaaactgatttgatcttgaaacacctattttattaagcacctaattcacatctctaggaagatatttgggggaatgaggagacagaagttttcatccttatgtcacataaacttatttagtatcttaaggaatactatgtgggaaaatgcttaaggaatactatgtgggaaaatgggcaatagtgggcttcttattgaagaaatccttcttagaagactgtcctggcatcctgttatatttgaacatatgcctggtatctggaagcaaaactgtgcttaaagttttttttcatcccagtagagaatcaaatatgatcctcaccgtcaacaaatgcataggtctatctgttcttaccttttgtaggtaaaatcttcagaaatccaggtgtgtatgaattatcagtcttacaattggggaagttatatttgttattccttggaagtaaatattgagatatgacttgcttgcttgtcttttgtaaatgttttcaaacctcaattctattttattttatcagcaagaattataataactgtctcatcattgaaattagataaacacggcaggtaaatcactaaaagctataggcagctattaataagatacttgaatcagcaactctcctagattatttcagcgttcttcccaggactacttcatatttaataagacaccttcctcaatgtactgactttttctgagcttcacactttccaagtcatcttctttttcacattaggagcagggagggatatatatctcatgtctccttgtcttcttctttccttttcttttttttttttttttttttttttggccaataaaaagcaatgtctccaagttgagaacaactacttttctaagctgtaattttgtatcttgttacaaatccaaattctaagcctatttcaaagtcttgctctaaagctttaatcttttccaaacataaggctattgcttacaatgaatttaacatgttaacgtctctgcagcatcactggctgtagacatcagcacagcatgcatccatctaaataatttaatttaataaagcattgggcaaaaccccacattccaaaatgtcagtcccaccccatgtaatttcaatcattgtatactcattcatttgtatttaaagctttgtcttctttaagcttaatataaaaactcacttacttccggaaggaattaatccttgtcaataaacacctgggttaacagttagggacatatttaacagttccccgagagcacaggtttataggaataagacatggagagaaagaggttacaagacagagaaaatttctacatccatgcctagggaaattttttaggcagctcaattcctctttatcccacagaagtcacttaaaaagatgagccaatttcttctaacacataacttcttacaggatcttcccctcttaactctaatataatatcctaaattatctcatggcacattagcaaacatgctccaatcagaaaacagttctgaaatttcttatatgagattttcatgatgccacaggtatggaactctgtggcccaaactacatctttctgcacatattctctatcaccagaaaatgtatgccataagtatactctaagatctttaggttcagcactataaaatcttttgagtgtattggacagcacaaaataccgaaagggaatttaagggatatgaactggtagtttaaaaatattttcaactacaatttggtgtttagggaagattagaacaaagcttggtactaaatttccaaataagcttaggatttggatttcatactagagacagaagttctcatctcagcccaggagactgggaataaaaacattactaagattggaagcaaatctttttgtaagattacaaatatgggtgtaaaaaggcaaattcttcttttaaagattggagctttatattgttgcttaagacaattgagacaatataagaaaggattgtaaaatgttctaagagaagggctatgtgttcactcatggactgaatcagcaagtgtttctgcagagttcactgggacacttcatacttcaaagattaattgagttcttgcttcccagaattctctactctttcctctcccttttcaaatgctctctttcaaagctcaactgaaattctctcttcagaattaagtcttctctgagcattccagcccatccagataggcctctcccttcaactcagacactgttttggcagattctactataaattatttcataagtgtggatattttctttaagaataaaggtgccttgcggttaggaactggatgttgtatgtgtgtgtgtgttgtattttacccaccatatatatttgtgctatgaagttataaccacctaacaggttcttcctgcctactgcacaaacataataaattcacaaaggccatggcattgcagtaaagaaagagtttcattgatggaggttggccataccacgtgggaaatggaattattattcaaatcaatatcaaaggctctgaggttaggggtttttcaaaggtagcttgaggggtaggcggatagggtatggggagtgctgattgcttggatgagagatgaaatcatagggagttgaagctgtcctcttacactgagtcaatcctgcatgggtccatgggagcggttgtggatcactgataatcagagcaaaaaacctgagaagatatctcaaaaggccgatcttgggttctacaatggtgatgttatctgcaggaatcactggggaagttgcgtgtcttgtgacctatggaaaaatgtctggcaaccttttatgtctacaccttaacagaattcctctactcctcccagcctggtggtctctcattagctttacaaaggtggttggttgagttttggggaagagctattatcacttaaactgtaaactaaatgtctcccaaagtagcttgacctaagcccagtaataattaaggaaagataaaggcaagacagggattagttaaatcaaatcctttcacgctataattttctcactgttataatttttgcaaaggtggtttcaaagtctttcctgaccaaggcttcagatggtgtgagtataagccccatcactgccaaatagcacctgtttgacctttgactagctacttagactctcagcatcagtatctttatccagagaatggagacagaagactttctctctgccgtcatctgcatgttgtgaagattaaagaaggcactgtgaatgaaactgcatcatcagttataaatagtttccatgatgtgaggttctgctagcacatttggtactcaaatttactgactgaaggaataatggataaatctaaatgctccctagagttatacagtattataaagtatatagtcacattgaacaggttatgttgaacaagtgagattattaatatacacaggttatcaatgagatgatttattagcacataggtcattaatggcacaattagcacaattaggcataccatcctaggcaagataattggatgctctcctttgaatctgctgaagctctcactccttttggagcaggaaggtaaactaagatatactggtacttatgcaaaaaagcatcatgccattatagaaacactctatgaattaatgtgtagacccagactcacttcatatttcttgctccattcttacttgtttgtgttacttactagctttgtgaccttaggcaatttattttatccatcacagactcagtttcttatttcaaagaataattttcaaaaaatatgttatgcaaatacaaaaattatttaactcataaatgagactatcagtaagtatcagtaagatggtaatgctagttcgaagagcactggaaaactagttatatataaaaattaagaataatgaagttagttaataatagtgtatcaatattgactcattgattgtaaaagaaattactacactaatgcaaagtgttagttattagagaaactggagtggatgctgtttataggaggagaggatgagaaggtatagggaaactctgtattttccacaaattctttccataaagccaaaactgctcaaaatagtgtatttaaaaaataaaaataatatggtttaaataaaattttgagtttagatataaaatttattaatgttctacagagcaataaatccatatctttggggttttctagtaaaaagaaaccctttgcctctttaacagacaaaatgaacaagttaacatataacttcgtagtgtgaggactttaataataaatagcgcagtcaaaaacaggtatattctcttagaaataacctttaatggcctattaaataatgccccagtatgacactggaaggacatgaccccaccctttgtcttatttttcaattttgaataactttttcttaattcttttgttattgttgttgtgatgatgatgatgtttcctctgggctttcttatctccagcatgttgcagctttcatcttgaactctgacttgacttctcatctttcttcacactcttggatgctccccagcctagttatgaaatggccctcactttgttttatcctcttggcattggcctcccaagaaccctcctcagcttctgattcctcgctggcctagtgctcagcctaagatatgactctgggtccctggaaactgctgagtcaaaaaagtgacaaaagacagcaagagcctagaatacaaggaagtataaagagcaacatctactatatttactaattgccctgcttctgtagtctccagcatctctccttgcacagaaaaccatcatgaagcaggggctcaatgtataaaccaaatttggctagacctgagatcggttggtcaatcatcttacaaaaatataattgtgcaaaatcctgtcttaggaagaatcgacaagaaacacaaaaataacattgtacatataataaaaggcaaaacaaccacactagaaatggactaaaggcaggctaaactgcctgaataaaaagagaaaataactgacttctgggctctgtggtacagttaacaaaccagtagaggatagaagttaaaagtgtagctttgaaatccaaaataagtttatgtcttgatttgatcaattattagatattaaactgcttaatttctgtgccttagttttctcgtaagtaaaatggagacaatagtagtacctatctcaaagagttgtttagaggattaactgtgttaataaagtaaagcccttggtctttaataaatatttaaactatgtcaatggcgttatctttgatctttataagccgtttctcctccctgagccttagacctctcatctatagaccaagtataacaatatggtcttgactggaacccaaggaatgtgatacattcctcataaggttccagtttcaagtgaaaatctgggggcagaagtggtgtcattaagtgtctaaactgataagtaacttcaagtagcattttattttacataaagatgaatatctttttgagctgatgcatggaaatttacattaatttaaaaaaggaaatgagacacaatgggatatttaacaagcagtgcccatttaaggctatgccatcccttccttatcccctccacttccctaaggagggtaggtttcctctcttttacccttgggaatctttgtgtatgagagtgtgagccacactaatttattaaaagctactaagtacttagcaaatataaagtgttcctagatgcagtgtcataaaacaaagaatgagatatgactaaatatcacaggtgaagaataagtccaaatttttcattaagtgatgagagatgtgaaatggtagcaactttggaggcagagggagacaaaggaacttacgcgagagctgagatttgaagaaatattgggataggctgtaagaaaaaaaattatccgaaaagggctagtaaaaaataccattcatatcctcctgtgataattactggacctccaggtgtaatagagctaatgaactgtttggacaagttaaaccatgagtttttggttttgttttattttccttcatatagatggctaataccttgatgacctggtgaactaacgactgctgatctcaaaccatacactgtagggtcaagcacagtatgataaataacttgatttggtatcggtttatttgtatttaattagaaattagtattgtcaagctcagaaatgggaatttgatggatatttctatatagtagcaactttccacttctttgaagtggaaaggaatgtgatgcaatcagaatctaagaggcattagtcaggctgtaggatgttaggagaacactaaatcgagtagctatgaatggacaatatatacgtaattttttcttactccggggccatgggccagtactctagcaatcagattgggtataggaagtatagagcccataagattttggtcttggtaagttaaacaatgaagcttgagaccagcctggccaacatggtgaaattccatctctactaaaaatacaaaaattagccaggcatggtggcacactcctctaatcccagttacttgggaggctgaggcaggagaatcgcttgaacctgggagggggaggttgcagtgagctgagatcgcgccattgccctccagcctgggcgtcggagtaagacgctgtctcaaaaacaaacaaacagtgaagcttatgctttcctgtgctataggtgtgcatgcattctatatttctacccaatggtagaatctttttttttttcaacttaaattcttatctaggagttactatccctgctagagcagtggctctaaaccagggggagttttgcctcccaaagacatatttggaaatatctgaatacaactggcacaactagaagagggtgagctactcacacctagtgtgtagagcccaggcatgctgctaaacatcctacaacacacagggcagcactccacaaaaatcttatccagccccaaatgtcgataatgttgaaactgacaaatgtatgctagagggagcagtcttccatggttttcttctccctagccttagctagcacagaaccaacaaaacaaagtaagtagcttacaacttagagtaaaggctcaaataaaaacaaaagggggtaccattcccagaatttttaaattggaaatcagcgcttctcagaatgtattaaaaagaaacaaagtttctgcagactctggtaataaaggctgcaaatagatgttgagcacatgtaagggataattataattgtctaaaaagaataaagtacttgttatgtaaaagtgacatcccatgacaaacaagtgtgaagtaagaactacaggaaagataaatccgcagaatttaacaatgtaggaagaagacacaagaccagccagatcatcattaattttttatgaggagggaactgagagtacatactgcagtttgttgtattttatgcttatgttctcatagacttccaaggttagtattgtagaagattaaagatagttgcaaattgtttgactctcctttgttgaagaggtgggctccatatcaccttcacttgaaattgggaggcctttgtgattgcttaaccagtagaatagagtttctgggcccaggcctaataagacttatagctttcacttgctatcttttggaggactctttctgagaccccaggatgtctctgaaaaaaatctaatttactctgaaaattccatgctataaaagtcacatgtaggtactctggtcaatagcaccagatgagtccaaccttccatccatccccaccaaagttgcagacatgtaagtaaagctgttttggacattccagaccatcctatctgcccactgatacaccacagagtgacctctgtaaacaccacatcaaaacaaatggccagctgagtcctgaataaattcctgatttaaaaaagtgagatataataaaatatttgttgttttaagccattaagttttgaggtatttattatgtagtaatacatacacaaaaaaatcctgttattgtacttatgaaatagcattttaaagaactcctctctaggtattgatatatatgtagatataaaaattgaatggtctctacctgaccatgacagattcttatgctgaaaagaaaacagcagataaacatcccactttatagattgtttatttcaactgaagtgagctttaagattgcagaattatagcacggcttgtggcaaaagggatggctttcaacttagagataaggctgataaaacagaattaagttcccaccaggtatggaaacactgccagcttaaatcaacttggtttagaattcgttgcctcttatgcggactaatcgggacgcttgttaattacaaagatatcctttattattgttcttcagaactctgtctttcctacttggaaactttgccagatcctgatttgtttatcttttaccttgaccaaaaaaacccacaaaaaatcaagacaaataaaaaaacctatcttttaatgctctccactgcttgtgatttgtccaaaaaataataagttgtttctctagcttgttagaactgatggggaaagattgtactccaggaggtcaagagagagaggaagccaatgctagatcatgggcggtgagggaccggttcagccagagagggagaattgtgagaccaactgggaatcatagttctttcctgcttaggcatgtcatttgccgtaacctcatgcctacgatatattctggttttatctactagagatgtccaaaataagtttattcagaattacattctctctgagttttcttcagaaaaaacattcttatgtcctggaattattcttcatattcaagttttccccttccagaaaaatattctttttcaagtatgaggcccataattgaacagaccagtacatagcagagcaggattgtcaacttcacattcttgatcatgatgcatctttcagtgaagtgaaatatagtttgggccttttatgtaatgggcacaccgttagtggttaataaacaataacaaaagctaccttatacctctatactatttgttatatcttacctagtcagatatgcaggaacctaaaagaatatctgaataagtgagtcatttgttctgagcaacatttctggaggccaagtatcagatagaaaggggtcattagatcaaactccaaccctagatactcagctctagggacgatatctaactactacaagcaggagggtagttctttaagcttctgatccatgacaacgagtgggtcaaaagatataaaacgaataatttgaaaacaaatagaattaaggttcatggatgtcctaattaggcatgtctagtggtaagcatatttttatttatttaatgtaggtataattttttagaaatggaaatggatggatgaattggtcagctttagtgaaatgtgaactgtataaatgcaagcaagtcagtatccagacagaatgagaacctcttgccttaacacaatgggcagctggtagtaaaataaaatcttgtttatcttgccaaggtttgggctgttagacagaggggaaaaagaaaaatatacctttatcatcagtgtgtatgtgtgtgtaaaggcaataaaaaatcctgttgccactgccttcactctaaggtcaaacatgaaagaaaatttttaaatgaaactgtaagttaacctggctaagagtggatgattagcagtggatgattcaaaggccccaaaggctatttaaccagtagggagtcacagaagaccggttcctgcatggacatgtgtgcacacacacattaactgttgggtcttcttgcaatagaaaattcaagggttccatcatcattattttagtccatttgtgctgctataagaaaatacctcagactggataatatataaaggacagaaatttattttcttacatatttggaggctgggagtccaagattatagtactgtcaggttcagttgtctggtaagggcttcattctctagagggtggaaatgctatgtcctcatctgatggaaggcagaagggcaagttaggcaaactgcataaagctgcttttaaaagggtcataatcccattcacaagggagaagccctcatggcctaatcacttcttaaaaggccccaccttttaatgctgtcacatttcacaacacctgagttttggatgggccacattcaaaccacagcaatcaagaatgcatatgctcttatacgaaaggatttgcttgcgtaattatattctttatgaaatcttacctcatctacagagtattgtattctgaaaacctaacacactaatattgctaagaaaataaagaataaagatgtttatcttttttgatagtcttcatcatatgtttatagcttctaatcaaaagggtaggtttctatcaaatgaataacacatccgtggactgacaacaggcatgttagcacagaaaacactaatgagtaggctttttgattttgtggaccggctgtaagttatgtatataaaagttgtaggattggtggcttaactacatagtaaaactaaaactttaagtgcatgttaaggctttcagtgtaaacaaatgtatccaataagaccaccattccctgaaacattttgtgaaatatattcataaaatattgtagactctatggaacagcctcaagatacagcaactctttgggtgtgtcacaaacaaagtctttggtacttatttgagtaaatatgatggattatcaaactgagttgtgatgcttggggacaaaaacataggatgcagatactgaagaggaattttcaacatgactatttacctaattctaaaggcagttcaaagagagatgttcaaaatatttaaacaatggtaacattatttgtgtagggcatgctttgatggagtaacaatttatatggttacattctgattttttcaaaaattctcgttatttctgagtagtctcttaatatgctccagttataatagccaaagcctaatccatacatctctatttttaaaaaattgtagtgccagatggcacagatgactaggaacaagcagcattttaattcattagacatgcattagagaaaatatatactcagtgaataaaccattgcattatcaggcttgatgccagcttatggatctttgcatcatgtagagtgtggtacaattattttcacgttctgttacctgtaacgttactttatccttttatttcattaaataacaaatctcttaaggtctatatcttctgtaattttccaacttcattcattcaggtcaataaaattttatagaacaagtgctatctaccaggcactgttctgttccccagagatatagcagtgagataaatagacaagattctgcccttaagagataaaatgttactgattgcttattagattaaatattaagaagattcatatgaagtggtgtaatgtaagttttcatttagctgcatgtgatgtacactttctcctccacaatgtaaagggtgatgtttattttgcaaacctctctcacaacccattgccttccaagaaaagcacagtcatgtcttttttttttaacatgaaatgaagatatagataattctgaggacaggttgcaataacacctgctataagcaaatgaacaacacaatgtcatatcatgaaaagggcagtaaaagaaataaacattgttattaaagagaataatggtgggtggtaactatttattgctctgtataaaatttcacaggaatgtagaattcctgcacctcgttctggtagtatcatcctatcagaagttggttctcagcagtggtattgatgggaggttgttggttttgtgtgtgcatgtgtgtgtgtgtgatttctcttcaaaggcttgtaatatgttactaaaaaaactcattaatttctttcaatgcattttaataacttttaataagctttattaacttctgattgacattcttcaaatgaatctactctattcatgtatttatctaaactgtatatgaatttatttttctttccattctctaaaagattctgtgatctatgaaaccaactgaccctgaatcttccagtctctaggaacgttctttctttaatattaaaaaaaaaataataactgtactcaatcctccatctgacttcagggaattgagtctctttttcaaattttttcataatatccagggcatcttacactcctggttgtcatcttccgttcatactctgaggtccggcttctagggtatttttattcattttctgtcatctttttaccaggtctccaaatggaacctgttctagaattcattgctctgtgtcttcaaaaatgaaatcctttttaaattcctaaaggaacagataattttgtggagtaataaacctttactagatacttgagaggaaaatgaagggaaaatacagaataggacagttctacatctgacatcatttgtcttaaattccatcagcctcatcctgtcacttttctaatgccctgcctttctggggctccctttctcaaaacttaccaaaactccttaatgtctttgctttttataatatataaggtttccttaaggcagatctttttattctgtcttcaaaacaccaaggaccatttcattttaagtcagtctcttcattttttttttaatgcagaacagtttagctccctttgtgttccttgatccatgttttcaatattttcctcaatcaaggagcagtttccttcttggtgtgaattctgtagttctttagaatgtgaaagcagcagcagttaattaccttcattgttttaaatggtgactttctgctatatgctcagtaaggctccactcacctgtaggtatttttcttctaatgcttcacacttggaacaaagacgagaataagcagaaagtaagctggaacatctagtagtcactgggaacagaaagtgcttgacaggatgaaaagggcaattacagatcaagttcagatcaaggaacttctgtcctggggccgctgactggaaaatgaaggtggaggtggtagatacatttgagaaagtacaatattgagacagaaacatgtaaaaaacaaaataacaaaaaaaagaaacaggcaagctttgggcaaatgaagtttacaggatctgtgtaaagcatgcctcagcgtacagtaggtacaccccaagaaatgacagccatgaggctgttgaaaaaaaacatatccaataaatctgtttttaaatgggtcagtagatagctgtacctctatagggactttcagcaaatattaacagtcccaatagacattacactaatccttgggtagtttagaatcaagactatctccaagcctgctagttatttgagtgtgagcgaatgagagatccagcctctcaatgatcccagtgagaagaggagctgattgcagagggcaggatcaaccagctgggaaggggctaggaaaagggcaagggctgatttcagtaaacaaacttcctgtgatttcctttccagctggaggcacctcattgttgcaggctacatttattcaggtcactccatgtctccttgtttatttattctacctacaatagactatcaagctagaacaactagccaattcttcaaaatgaacattttaagacatcaaagaatatttcattgtgtacacaattaaaacaaagtaacaatatgggatctgttaagcaaaaaataatgggctcgtgaactttttttttaatcttgaaattttctgtggagcctgatttccccagtttttaggtctatgactattgcaaacaattccttaaaacctcagtttcctcatctgtaaaatgagaatagcagcagtatctaactcagaagtttcttgttgaaaataaatgagataacaggaataaacatgcagtcagctcagtgctgatatgtagtttgaagtcaataaatattgcctattattttatcatcattttatcatatcacttttacgatgttcatttaatttaactagacttccttagtctttcccagtgaactcctagaaattataattcattctgcaatgacactaaggactctaaattaaacagagtaataaaatattcaccataaatgaaactatccttgtaaaactcaagaatattaggaaaccatgaaagtggattttatgcagtaggaaatacacagatttaaactgaataagagttttcaaatgaaactccaagggcaaatgtggttttatttgagagaaggaactgagaaaaataattaaataataatccaataataaaactgggccagtaagaagaaaacaagagtatgtgaggttccaggaggctggtattaaaattgacatcttttaatcatgttcgtatgccttaagattacacctagcatcatttagtaagccaagtcatctttatttctttgcagtagtaacatctttaatagtattacttactaaaagtgttatatcatttttaacaatttttctcaaacaacaaatatgagaggtaaaaagtctgattttgcaccaaaggaaacagaagcggaggaggacaagtggcataggctgcttcatggagcttgagagaagcaaaaatctcaagctccaagcctgggacattattagcccatgttttagtcctataagtcatggtctctgcctctctgagtgatgatcatttgaactacaccaaaaaggctgtaattcaggcaggttgtccaaatgttcttgcttcaaaggcccgagggacaaaaggaaaataatttttctgaaattgatatatatcacacatcaaggcttcttatcattgtctaatcatttacaagctctcatttttctagggttggtaattttagctggaggaatcccagacagtcagtcataagagaaaatgtgttataaatacctagaagcgctggccttaagagcaggcaaatgtagctaatggtttgagttgaaggcagaaacttccaaaaccaaacaacaaaaaattacacaccaaccaaccagagcaaccaacatttaccattagaaatccatgtgtttgtgttatactgagtgccaaccataagccaaatactcatctagcctttttgcatatattattttacttaacactcatgttcctctaaagaaaatattttaattccattttatatatggagaacacaaggcatggagagtttatttggcttatgggggctataaaagcctcccaaaattgaaatgcctaaggaaggtattaatctgcagctattccttatctatccccacatatcttcccaaggttcaaagaaagactggtgtgttccaggcagaaaaaggtataaagaaattactatgtaaagacttcattatattgtgtacactattttattcaggtctttgcatattaaaatagtaaattaaaattgttgtattttattactatattttttatcattcgtgtaaagacttccatgtttgtgctcctggtggaaaggaagccaagcattgctggaagaatgaggttgttaccagcactaatgaccaacttgtccccatacaggaaactagaattgtgaggagaatcctattcagtcaagagagtggactgagcctctttaaagctggactttgaggagttcagatgaccaggtatacactccctcctggtcagttaaaagttatactcaccactttatcctgatgtaatttcttgaacccacagtgtcagacactgttttagagaccggtaatgttattctcttatttgatattcttaagaattgcaactactttatgagttagcctaatgcaggtaacactgaggcaggaaaagaccccagagttagtgacatacaacagcaaaggttgattgttgctcatgctgtagatctaatgcagatcagctgtggctctgctgtgcattgcctttgtcctgaaatctagactaaaagggcacttttgaatacaaaattgcaaaggaaaaagagacccagaaaactattcgctcttaaaacttgtcagacatgacacgtgttactcctgcccacatttcactgaccaaataagttaggtagtcacttctaagttcagtagggtggaaaaatataatcctcctgcaaggaaggacagggtagaaaaatggaatatatggctagcagaaatgcaatctgcaatgcactatttagccaccaaatatttagttccctctctcacccataggcagaacatacctccttccctgaggaggcaactcaaaagtcctattcagtaattgttcttagcttaaaagtcaggcttttcggtgatgcaaatttttttcaccataggcctgtatgttgctcctccggtgaactataagatgttatctttcctcacatactcaatatgcaattgtggaacagaaagcaaaaataactgcaataaaatctcccatgaggaaatataaaaaatataaggcacatagaagtcactggttcatagaaatcttacagtactactggaaagatattataggtgacttccaacatggagatgaggaagcttcttgattagatcctgatgccatattttcatgttttattttgttaacagcagcctcaaacttctcatacaaattagtcagtagcacaggctggtttgcccccctctggtaataaatttcttcaaaagctccaaagatggcttataatactaggatggaacgacaagtatttgcaaagtacgattatgataaaccacaactacagtacagtatgtatggttatcatgatcatttaatggctgagaacatggtaactccaagcagtcaacttcctcattcaaggctagatacccagaaccaggattccaactcaagttgacctaactccaaaatctatgtacatttcactatgtaatgcttcaactacatggagagggtattttaacaatgttatttgtaattatctagatttatgttattccttctttttcttctagtttttggtgatgtgttgtttgaattattcagcctttccttcgttattagttatccattattggcctagagccttaaagaaagtactgcatcctcaccaaagggaggaagttggaagtgctgatcagtgagataccacaagggtaaaatctgggaaactttcacatttaaagatcaactacccctccccaccactagattcccattttagctttagagatctgtgagtttatttccactttggaaggctgtggtattgccaggaaggcatcaaagagaaacttattctctgtctcaattttatcaaaggccagctctgatactcactcaaaggttttttgtactttcatctactccccaataacaaaggctctcttttgaccaatttaatctttaacagaatattatattactattcaaatgggactctagccaagcctaatttgtctatggcaaacaaatggcaaagttggataaagacagcctgggctgtccctgtttgtcagcgaggttgttttcaaatagcaactggagtaaatgctttagctgcagcttacacagaagccgatgccagcatgtggtgcgagggaaatgaagccagctttcaggagattgttccaatggctggagtccatcccctgttcacagctcactcccctcagcctgatgttctcatagaactttacacttgcttctcactttgacagtattttcaaatctagaaacactttcaaatcattgttttggttggaaaaaggaatgtgtccctagtggaccaaattttggggggaacagggacaagtcagaaacaaactactcctgagctccacatggacaattcactcatgggattaggacaaaaattttagttgcagcaagtcagatctcaggtgaggactccctccaagattagtgctgctgggggtgcttgtgcctaacagagaaagctgattagatgctcttgtttcttgatgctttgcttgtttttaaaaatattcatataaacaccaggcctagggcaataagtctctcctatgaaaatgtttcagtgctatgagatgaaatttgtattcttgtggcttgttccaatcctctgtactggaaaattatttgccaaagatgagctcactgtatgcctttgaggaaaaaaaaaaaaaaaaaaaaaaaactcttgtcctaagaagaaaacataaattgatgccaggacaaaggaaacttgtaaccagaaaacttgtaatatgattgagaaaacaaacacaaaaatttagaaatacatctacaagagacaacgggaaagaaaattgtgaaaccaaaaagtcatgtccattttaaattccataaatgcaagagctatgacaattcattcatcagaatttcgcacaagacttggcacatagtaggtgatcatgaaatatttgttgaaaaatgaatgattgctaaagaagccaagcaatagaataaagagcacatatttttcattaagccagtgttctttagagaggtggttcttaaaagaataagagaggtttaaggcctggcgcagcagctcatacctgtaatcccagcactttgggagaccaaggcaggtggctcatttgagcccaggatttcgagaccagcctggccaacatggcaaaacccatttctactaaaaatacaaaaaaaaaattattcctgcagggtggtgcattcctgtagttcctgcttcttgggagactgaggtaggaggatcacctgagcctagtaagtcaaggctgcagtgagctataatcatacagctacactccagcctgggaaacagagagagactctgtcaaaaaaaaaaaaaaaaaaggaagaaggagaagaagaaaaataagagaggcttaatagtggatagaatgaaaaagagaacattctagacagaaaattggaatttggaacttgtaaatgttcggaggatgaaaatgttcacaggaaacacaaaagataatctagctggagttcaaaggatgaagtccaagctcccttgcttgatcaatattattcctaatgccaatggacgccagctgagtctggtcctgcaggaatggagtcagccagtgtgagagttccacagggctgaggctggaggggcaaggtctatccagagctctgggtgatgccaaattcaaaaaggggtgaggatgtcaaagcagagtaaaggaacaaagatcatcagcctaggtccagtcaggtcatcaaacaagggagggtctacctctagtgagcaccagaatacatggggaccagaagggagatgagtgagaaacagggacagtggtgctgagctaatacttcacccactttcctgggttctctcctgcatggtggcaaggagagctgtctgaatctaggcagaccaacatggagcaggtatctttcttccagtcctgccccacatttgtttctgtaggttttccaagtagaaatctctccacatactggaattttcttgaggcttaggtcagaaaaccataaccattctttcatccctactgccctcaatgaaaccaaattctgtaactaaccatagtgcctacattctacttgtattttccttctcatctcagatcactgagacaggacatgaaggtgtggggaggtagtctgagtcttggcagaccgggcccaggagagaacagtgaaaggtgcattagatggttggtggtgggggagaagtatgtttgcattaaaagctacaaggttaaaatacctgcattaagtcacagatcccagattgcattccttttgttttcctcactgttgaatagtagtggtgttaaggaagtgttgtcatatggcctgcttaatgttcagagtgcagagcgtgcattatattcttgttttgtgtgcattggggtgtgtcctcagtgtccaatttggtgtcccatcacttcttcaaacctctgttagatgcagggaaaataaaatttagtgaattcatctcacagccccaggccacactgcagaaatgggccccaaatgctaccttgctccactcaagttgctgtgtgaggagataaacctgaaaaaggtactctaacttattccttgggaaattcgtgattctgggttatccctctcagatgaaaactcaattgcaaaaggcagcacgccctaaagctgtcctttccccacaaaatataagaaaaataacatgacacttccacatgagcctggctttcattgatgacaacaaatgcagcaagaagctggcgtctggggcagcacccagcaagtatgcaggagagggtaggcagcagtgacggaggtgaggtcttcactcaggccttgacttttgcctgggtagcatagatcactgctagcctcatccgagtgaactgagaacataatcactaatgctcatttcatgattaatgtacttgagcagaacatttcttagatactaaggttaataccaattcaactaagcttagggaggggatgcagctggactagaaagtctgaataagtagttacctatctcttacatcaaaatcacctgtgtctgcaaaaccacacgggttcctgaccactcccaaaagacttctggtttggtctggggcagaaccaggaatctacatttttaacaagcaccacaggcttttctgatgcagttagcgtaatctcaagattgagcaacactgatcacggatatgaaaaatgatgctactttctacctgcgatgaactgaaatggtagaacttggagatgtcatcaggaagccttagtggatcatcaaacaggaggaggacaaatggtgtgaattaaagttcaaagcaagtgattggaaattatttggaggcagtcacaagacaatagatggagcaggtaagcaggcccttgaggccagggctggtgtgtctagtggctggctatcgctcactttggctgacttcgcttggctaaatgtgctgggtaggctggttgtgtttaaagcaggggttcacaatctagccatacattgaaattacctggagactttaaaaacactgatcccacacctagagattctgatttcattggtctggggtctgttctgggcagattttcaaaatctcctcatgaggttctaatgtgtagtcagctctggtttaaagaatcggtaacagcaggggtaccttgattaaatattcttttttttttttgaggcagagtcttgctctctcacccaggctgcagtgcagtggcgcagtctcggctcactgcaagcttcccctcctgggttcacgccattatcctgcctcagcctcccgagtatctgggactacaggcacccgccaccaggcctggctaattttttgtatttttagtagagatggggtgtcaccgttttagccaggatggtttcaatctcctgaccttgtgatccaccctcctcggcctcccaaagtgctgggattacaggcgtgagccaccatgcccggcccaattaaatattcttaaggagggctgggtgcaatggctcacacctgtaatcccagcactttaggaggctgaggtgggcagatcacctgaggtcaggagtttgagagtagcctgcccaacatagtgaaaacctgtctctaccaaaaatacaaaaattagccgggtatggtggtgtgtgcctgtaatcccagttacttgggaggctgaggcaggagaatcagttgaaaccgggaggcagtggttgcaatgagccatgactgtgccattgcactccagcctaggcaacaagagtgaaactgtctcaaaaaaaaaaaaaattagagatatatatatgtagatagatagatttatttgtatattcttaagaagaacttctcaaactgtaagttgcacacaattcaactggaaatcttgtcaaaattcagattccttctgagccagcctgacacaaggcctgagatcctgcattcctcacagctcccaggtgctgccgattctgctggcccacgcaccacattttgagtagcaaggatcaggaaagccacagtctctcactccagtccagcagtggaaacttgttagaaatgcagttctcaggtttcaccctacaactatcaaatcataaaccttggaggtgcctctgcgtttgaccaagccctgcaggcagttctgacgctctctcaggtttgagtacctctgctctgcttcataacataaccgtgtgtcactatttcaccagccgagctaggtcaggagcacttccttctctgaatatgactggacctttcccagtggggtgtctaggattttaaaagggaagcgtttcactttctttttcatcctggcaattaaaaggccattattctcacatgacccctaagtggtaatgaatctaacgcgctgctctttgttccagcgctgaaccacgcaagctccataaaatgagggggtggtcacgctttccagggtcttttctgtttctgacaggctgtgattccaccactctccaactagagaggctatgatggtttctgtgcctttgtccctggactccaatcagccacccgtgctgtattgttcctattgttatgcccgttttttaaaaaagaggagagggtcaaaggcagcagcaaacctcagatgctgggcagcagtcactcattcttgcaaagtcggtaacccctagcagcagggtctggcttacagtgcatggagacgcggaggcagaaggctgcaaagaagcctggatttcttgtgggaccctggctggctggaattaccccaaagctctagagataagtgtgggggagtccctgtgaagctgcttttccagctccttggcatttattacacactatgaactgtctctgtctttcaaccgtgagtgttagaaatggcccacctggaacgcacaaagccctgtgaggttgggtaatctagccatcccagtttgccagagatggcctcctttttagcactgaaagtcctatgaaagagcaacatctacattactggaaaacaggatggtcggcccctctagatgagggttttttaatgtcattagtggtctggataattatttgttatgaagggctgccctgtgtgttgtaaaaagtttagtagcatccttggcctctacgcactagatgccagtaggactcccccagttgagacaaccaaaagtgtctcctgacattgccaaatgtcccctcagaggcaaagtcactcccagttgacagccactgtcctagatatatgtgactgtgtagtctgaaacctcacctaggccagcaatcctcaaatgttaatgtgcatgagaatgacttggcatttgaacagacatttctccaaagaatgcaaacaaatgggcagaaaatacctgaaaagatgctcagtatcattagtctttagggaaatgtaaattaaaacaaaaatgacataccacttcacatgcactggggatgactaaaataaaaaagattggtaataataactattggcaaggatgtgaagaaactggaacccttataggttgctagtgggattgttaactagtacatccactttggaaaatagtttgagagatcctcaaaaggttaaacacagaagcatcataggacccagtgaacatgttcctagctataaacaagagaattaaaaatatatgtccacacaaaagccagtgtacacatgttcacagcagcattattcacaacaactgaaaggtgaaaacaatccactgtccatcaactgacaaaaagatgaacaaatgtgatctattcattcaatgcagtattttttaggcataaaaagaaatgaagcactgatacacgttgcaacatgggtaaaccttttaaacatttggctaagtgaaagagccagtcacaaaagctcccatattgtatgatttcatttctgtgaaatgtccaaaacaggcaaatccatagaaacagaaagtggatttgtggtttctaaggactaagaagacaggagaatggtgtctgactgctgatgggtacagagtttcttttgggaggaatgaaagtattctaaaattagatagtggtggtggttgcacacttctgtaaatatactaaaaaccaatgaatcgtacgctttgaatgggtagcttgtttgacatgtgaattatatcttaataaaatttttatttaaaaggatcaatttgggatcttgctaaaaatgcagattcagattcagtaagtctggggtggggcctgatattctgggtaatgcatttggaaaagcaaaactctagaacaagagttcttccagtgtgtttcctgaccagcagcattagaatcacctgtgagcttgtcagaaatacaaattttctgactgcaccccagacctactaaatccaaaattctgaaagttgggtggggcaatatgttttaacaagctctcttggtaatttggatgcatgctggtgtttgagaaccactgcctaggctgtcctcatcctgaatgactctttcccttgcagggaaacatgcgaaggtaaactattagatttttaataataataaataatattgttaaaaaatcattaagtttcattataaggcatattactttaaagaagtaagcctcatagctgaagaaaatttgatataaaggtatgttatccctggatcttggtggcacccaggacattttgtttattatgtttctaaaggttctattaagagttaaaataaccttacttcagaagtgccagaaaacacacaaatgatctcttctttgcatattggtatatgagtcctaacattatacatgtggtatccacttatgatttgctagttgaaatgaagaaggaaaaggaagtggatatggcagtaacgtagaaaggaaggggaaggaaaaatttatgggagaagtaagagtctgggatacattcccagctctggaaccaatgcgctggagggtattctctcttggccattgctgtgtggtgattcagtattttactggccctttggtaaaaggaaaggagaatccttatttttaatgttaagtacactactatttttattataaacagaaatagatatgctatgtttgcttgtttgttgtttgttttctgaaggaagactgagactacaatacaaagacctagtccttagggactcatttctagagctgaatacacctggcaactcagtaacagccatccatatacctaagtgccctcactgtctgagagagacatgcacttcattaacccatcttgagttcttcattcactaaagagccatctcctagtctgaagagtgaatgtgctcccctgaatctctaatttattgccagaaaagggttttagccttgggaagactcagctccctctgctgatcattgactgacagccccaggaatcaggtagaacaccataaagcatagtcaattgtccctgtcatccagtttcatggcttgtctgcctctcctatccttgatgctctccacagggcacccaacccagtgggattcatgttttccactttgccaaaatacaaactccaccacttaattcattcagacagtttgtacaagttgtggcaaggagtagttcagtgccgagcaatgttcttcttagaatcatctcagggagaaaattccatccaggaactgactgttacaaaggtattcacacccccagaatggagcagttcacttccttagcaactgctttcttgtccaatgaactgaactaatttaaatacaagtattagattgtcctatacaaggaatgtatgttgctgctcctcctgttgttcatgaggcatacctctcctttcaactataacttatgtaccacctctttcagaaactgtatcaaattaaacttttctagttaggcaatatgtatcatctctacaactgaagacatttcaattattgtatttttatggtttcatgcagtatgtgatgtgttttcaaattattaacatatctgaactcctaattgcctcctctctgtctccaccatatgcatacctccacctcaatgaatgataccatcatatacccagggactgaagcatgacacctgggaaacattttctgatttttccttttacatcattcaaaccaccaggaagtccctacttgcaaacatattttggatttgtcccttctcattccatggccaccacgatctcttttctggatattttcaataagctgctatgcagtcaccctagttctgcctacatttaatccattctctacacaaacaatggagtggtacttttaaaatgtatatgagatgccctttccctcagttaaaaacttttcatggcttttcattgtacttggaataaaactcaaagtcttaccatgactataatacacatgaaaaccgtctccagcctctactcctccctctaattattggtgctaacagcacactgactttctttctgtttctagaacaagtcaagtgttgtctataaagtctttacctttgctaaaccatctccataaaataccattcccatagctttcacatgacttttctttccaagttcagcccaaattcacccctttagaggagttatttgtgactaattagctattagttttcattctctaacataccacagattttcttttttgcattttatcacaatctgtaattgttttaagtatttatttgtttattatctatttccctgacatttatatatgctccagaaaggaggaaatttcttaatgtattttattattttatccaacaattagcacaaatcagtagtataaaatcagctctcaataaatatatatttactggatgaatcagcatggatgtttttgtttcccataaactcttgaagaatagaagctgatctatttttcattaagtacttaaagtatgaatagtccactcatcatatacaaacacatgctaattaataaaatgacataaggacctctagttgaacttgtctaggcaataacgtagagcctgtttctgaaagctccctatgtttctttgctctgcttttcctcatttttgaaatttggcatgaagatacgtgttctgttgttacaaaatggcttccaatcttatttgagaaattaagaactagcctttctaaatccttctttatctgtccttgcggttaaactgaactaaatattattatcacatgccttgaaaagggatccagagactatttattagatgcaataggcaaatatataataaaatcaccaattcctttcttttttaccctgattattaggtgggagattcaaaatgaacattatcctcaggttaatcatggccagctttatgtgaaatgacaacaaatgtactgggaccctattgattactttgtctgtttgtatgaggcgtattgtgggaggttgaattcaaagcagagtggtaatgactactgtcagggcttggccttcctgcagtactccctggttacctctcacagaactcctacctccacctcacacatgcttacacttctgatcatcaaaaactggcacaactcttcactgatccttcctcataagaattaatatgtcagaagtgaggctttaacaatttctggtgtatgtcaccctaagatactgacaaggagttgggggaagaatatatgttctattggctcatctcctctaatttgcataataatcacaattctccagagaaacagaacaaatagaatatataaagataaaaacaaagagatatatcgtgaagaattctgacaaaattatggaggctgaaaagttccatgatctgccatctgcaagctggagacctaaggaacctgttggtgctagcccaggcccaaaagcctgagaaccatgggagtctatggtgtgagtcctagtccaagtcccacgacccaagaaccagcagaactgatgtccaagagcaggagaggatgaatgtcccagctcaagaagagacagataatttgcccttcctccactttttttttctggctctcagcaattgaatctcaatgatgtctacccacattggtgagagtgattttctttactcagtctacagattcaaatctaatcttatctggaaacaccctcatagacacacccagaaataatgtctaactagttgtctgggcatcccttagcccagtcaagttgacacatggaattaactatcacaagtaggaagagataattttactaactatagaaattcaaaaccttctctgacacaattctgttgtctaacacagttattttcagacttataatacattttaagaaaaaaaaatatacttgctatttaaaacctaaacatgctgtggtaggcagtttctgacctggctctaatgactcccacatcctgatattatgtaaggctttctgtaatccattcccttaagtaccaaagaagggataaaatgtcactttcatgataataagactacaaaggatgttaagcttttatcttatttgtatacatactctctctctctctctctctctctctctctctctctctggccttctcacatgttttctctgataaagcaagctgaagaggctcatgtggcaataaattttgaatggcaacaaccagtgaagaactgaggttctcaggccaccagctctcaaggaacaaaaatgagtgagcttggaagctgatatctctacagttgagccttcagatgagacgataaccctagccaaaatcttgtttgcagcctggtgagagatcctaaaacaaaggacccagataagctgtgctcccataacatgatgagatgataagcatgtgctattttaagcaagtaaatttgggggtaagtggtctcagcacaatagataactagtgtatataaatagtatgatatttgacttttttcccaaggaggaaaaagaatacaaatattctataggaaaatttcaaacctggttacatagccacaaagaaactgaagaaatattttatattaatttgtccaattcaaggaatcaagtagaattgtcatttaaggatggagtggagcataataggcagcagacacaagaagagaagtaactagaaagacttccctccccttggataatcactctaggtgccagtggatactctgtagctattatttcccttgctgcttctgtctgcctttccttccctgcctctccaccctatcccctatcttatgaaccccctggtggtttatgagcagtttttttcctgctctaattggccttagtgaccttttgtttcccaggtactcaaaatgtgtatgtgtgtcaaacgatggggttgtatacacatcatctgcaatttggtacaaatgaggttgagaggagcatcaatgtctctgcaaggaggagaaagggaattaggtcaccacttgcatattcatgattaaagttatgttagttgttagtcacttttgcttacccctgtgtcagaatggctgtgttagaaaaatggaagaaattactccttcctcagaatgaattaatttgctgatttttgtaccctggaagaagggattgaaaaaaagaagttgaacctgcctagattattctcaaaagtcaattagaagtatggcacaatactactggggcaatctaagacatacactttgccaaataaagggataaattcattttgaggatgctagacaggcagggttgagaactaaatccaaaagcttggggctttgtgtcacttcaattgccaccattattttttgatacatttttttcctcaatgctttctggagagtaaggagtttccaaatagcctgaactaaaagtcagaagatttttgacttacaaagaacacaaggactttactaaggagccttgcttttcaaagactgggtcaattttcaagatgcattgtcttcaaagtagaaaaatcaaaagtacccaagttttgcagagttctgatctctactctgatattgatttgttacatggcctagggccagatgttgaacctcccatagtttcttctccttcttatctgtgaaacagagatgaaaattctgagcctcaaagtgatttggtggaaattaaataatagcttaaagccttttgaaagggtgaagtgataagtgtttccttttggcttctttcggatgttatgcaattttccatttaagtgaaaattaacttcaaacatatcacacttcagttttgacctaatcacctgttgattagtggttctaagctattaattgtgggatgtctaaaacagcaaatgtgagtggacacactgcatgctcgtatccagagtagcctagaataaagccttgcccatgattgtacctgcccccatagcccctttcacaactcctgtgtgcacaagcagataatataaagagtttaactaaaatttaaaacattgtatcctttgtgttttcattgcctctaggcaaatataggatatgtgtttttaaatgttcatgaataataaaaaataaaacaagagcatccagagaatgctagcttttcttttcaaataattttttatttatagttcataaaagatctagaaagacttaaagagcaaggtgaagtcccgacatatgtcatttaaaagcaggatggcatagtagttaagcatttgggctctggaatcaaactcagcttgagttcaaatctcagatcagtcaactactgacagggtgtaattggataaaagaaagacttatatttgtattttcttttttccataaagaggtccctgagatcggagaaaatgtcttgttgcctgtcacatctgaagcatctaatgcatagtaggctttgccccacaatattctaagaaaaaaaaaagaactattttgtacgccaataaatgtgccctagaataaccctacattgaaggttggaaaacggaaagatggctcttcaagcatctttcccaaataccaagggtggttttctaaggatttgttttaccagtatttagaaaaaaacttctactcagaaagcacagtgacagatgtagaattgctgcagaataaatcatgtgccctattagaggacaccaccgtggtttctttcaagccaatttgcttagagaagtacaaatctcttcttgcacaggagtggaattactcattatactcagcctcacataaagcttaactacttgccaaggctgctcaaagccttctggtggcctgttccttttgatggtggagaaagggttcagtgtgtctccaacgcttatgtaatataatgtgcaatcagctttcaattctctagggatgaaagctttaagctcaagcccagagaataactagattggaaaggacagtgtcacctggatagcaatcccacagctattgtgttgtagctggtacaaaaagtgaacttagaattttgaccaattaatgctgatgtttatgccaaaaaaaaatccagatttgtcctatatagagaattggatagtgctgtttggtttcctctaatctccttttttagctactgtttaattttcctccaaatgtgattagagaaaatagcctgtccagtaatttgttatcaaatctgtcttttgtctctgtaatggctttgataaataatggcctgaatatatagatgtacagttccaaataaaagaaagagccagtgtacttataggatccacttatagaaagagcagtattagggtaataaacttaagaaaaagtgttgacaaggagttaggagccccgggtgtgtgtccttgtaccatcattatctagctacagtactttaaggaattcattacctttctttgagctttgtttttctcctaggaagaatgaaaatgctgtactacctaatctctatactgactcaattatctctcctgtttcctccaagccatctataaatgctcactcactgaaaggacgttagccttatgctataaaaaaatttttttccaggaaaaaaatcgacattcatttctgcatattatcttcatactccttcctgcaataacacaactttggaaatgatattcctgctctcttcccagaagatgagatagtaagacagtgaatacctaaagaaaatggaaaatatatgtgaaggaggtgtccagccaagaaactgcctaatgtactggagatctaaagtgaccttttaaggttaagcacagagcctcctaatgaggtcctcatgcagtttattacctgccatccaggctgttccctctaaagcagagctacatagactgtcaaggacattgagtttcaaatacagtcaccagctgggtgacctcatctgaaaagggagcatgagccctacctagctgggtttctctcagggttgcaaaccacactttatgtaaaagtgcttacccaatactcagctcacaataaatgaccagtacatttgaatctaaattgagtggactgttcccattaccatatggaaactgccacttttaccataagagtttctggctgcattgatctaactggaggaggggcaagaagttaaatatcagtcccacctcccttttgtaaataataccaaattattttggctcccataagataataagcaattctgtggtaggaatggggaaaggaagaggaaatattatccagacattctaacatcctgaagttaatttccagaaatagtaggctaggagtgtttcagtagattttcttatagacagtataaattatgttcctagatatataacacataaatctagaatttatggaaataattttaaaaaatctcataacagctctgatgaaaccttggtgaatcttaaataagctattctaaaccttatcacagttttgcaaatttgtgaaggaaactctctctgtattttttagatcttgatttcttttaaagacatttattatataatatctgtagtctttatgaactgtttcttcaagtgtagatagatttttcttattttaccttcagacaacttcaaaataagccacatattatgtatgcattatgttttgatatatttatgcatttattttgtgacttgaggaatcaaaaactttaatttgtgttcaaagaatttttatatttttaaaaataattcaggtaaatacaaggtgcatgttcatcaaattagaagttgacacagaagactttagacctccagtatggctctgaaaacagctaccatgagaccagtgaagagcatttgattataggcagcagttggtatctgtgagttttagcatggagtgaacagagtaggctgacaaaatacaaagtctagaaatacataagaaaaccagtattcaggcttgaagatgggcagtaggtaattgacagctttagttctcgtgacaggtcttctggctgctcaaagacacatatagttagtttatgccatgaagagttaataccaaaatggttcaacggaaatcaaagcttgagagatgaaagtctgcaattctgtggattcagacttgtctacgttttgaaaattgttgaaatggatccatcagagtttatgtgcatgaacaatcaaggggccttgtgagaagtaagttatcctaagggaagggaatcagaaaatgcgcatttgactcactgtcagtaggttttgattgaagcagacatattttgaaaccgcatgatgcagtctactgaagttggccctcaagatagttcctgtgactcattcttcagtgttttaagaaagggattctgtccccactccccccaaaaaggggttttaaaatgaaagatccaggttataaaaatctttacaggaaattgggagtataaggcaggaggactttgtgagcttatcagtgaagtaaaaagggagatcattttttcccatttcagtatgagagaatggaagtgataagaaattgaaatgtacataattctttagagtggaaaagagataatagacattgttatacaggtggaatcattccccagggagcttgaaaggaatgggtctcatgccaacatcagaagcaaaaaggtggtattagcaacaccaccaagtaggctacaatgggcttatcctctagcatatgagagtttgggttaggtaataaagactttttctgttgcaagaaatactcattcaaataagcaaaaggaagaggaggaatatattggcacatagaaaggtaactcgttaaaaaataaaagaagtaccatcaatgtttactggatagaggaaaaaatacttcaggaaacagtttacctctgttttttatgtgtttttatcactacatattgctttccttccctctgcaaacttccatttctgtttcaccaagagtactatggaaaataagcactaccttgctattccacatgagcttttagctccagagccattaatgcaccagcactccattgctcccattaaaaaacttgtatgagagaaaacctaatcaactaaactgaggtcagatcctttatgggtaaatgtgtggggtcacactcaaaatatatggatacacaaatgcaggattggggtttaaaggatagttcttagaattagaacattatgtgtgccgttactccaacaagtctcgaacgcacagatatttctattccagtttcttccagtactcattagaagaaaaattggtgggatgataggagtttttaaaattccatgagagatgtctgagaccaaacaattattagtgtgacactctatggattccagaatgataaggtctcagaaatacgtgacacagcagagaggcccactaaagctagaaagatcatgagaacattttccttttttttttactatcatgagtcaaaaagaaatgtgaccacctgtcttggtcacatttacctagttattatttggatactaaaatgttaaagaagggaatgaatgtcagattcaacattaaagaatcatgctacggtccactggtatgtgaatcatacataacaaaagggctgctctgcatccactgagtcaaccctcccatgctttatttacatatgggattctttgtcttttcttatgtcaaactttgtaagtgtaataaaccaaggcattgtctaacatggccactctaacagtggccatgaaaaggatcacattttgagttttagagattatatagtataaaactgttccataagatagaactcattttactaggtatgctttttgtttgaatcaagttataatagacatgatgaaattatcttgaaattctagacaacagtaaattctcattgtcatcggtaggttcttgaaaacttcaaaacttcaacttcaaggcaagaaatgtataataaaccaattttaccataggctaattgatacaaacaagagttaaattcctatggcatatttctggtcacaaaatatcaccaaatatctaaagaccaaaacacttctacattaaacgttgaaatgaatgtgagttattcctacatttaagaaagatgaatgaaaacaagataattattatccatgtattccagttcagggcctaggtggttggagcccatctagcagtttaggacataagtcaagaaccagttctgaacaggacaatgtccattgcaatgcaaattcatacacacatccacactcacccagatgaggacaatgtagacagccaattcacctaatgtgtacatctgtgggatgtgggaggaaaccggagtagtatgtaaaaacccactcagacatggggagaatgtgcaaactccacaaacaatggttccagctgagagttagttttatttctcaacaaaggaaaacaacattgaacaaaacactactcaaggacttactatgctatgttgtaactgacttgaatgataattttttcaagtgattgccaaatgtgttcaagtgtgaggatccttttaggatcaaaacaaaaatcttacagatctgcagattctgctagtttcaagtgattgagaaattacattataacaaatagccactataaattcagatacgtttttgaaaaattttattacattaaatacatttcaatgtgttatgagcagtcattagacatttataaataaagattggtgccaatttggaaatgagaactttaaaaaaaaactcagcaaccctcaggaacatatggtcaagaggttagtaatcattcgtttgtaatataatctcactgtacagatgaagagactggagttaaaaaaaatactgagtgattttcctaaagtcagaaatctagagcattactgggagaaccagcattcctgggagaaccagtgtgaatttagttcagtagacaaggatatcagtttaagactctatctcactcaaagatcaaattacttcattttttgtctttaaatatcattatttggcatgtattatatatatgtattatatatataaaatatttttcaaatacatgtcttaaaaatatatattaaatgtatacattatattgtatgctagatatagtgaatattatattttgaattttgtatatatgtatacaaactgtacaatccaaactagcacaactatttttcaatgaacaacatctagatactctggtagccagatggcttcacaagtaaaacctcaaactttggaatgattatttcctttacccaacagtgtgagggagttttgaaaactctcttagcttcctccaaggaggcagtctcacactgtcagagtgtttaaacacatttcatctttatttttctggctacttaacaacattaaattagtttgcaagaagtataggaaagccataaagatattaataatatgtccctttatcactgccccaaagaagtgaatgcgtagctgagaaggcaaaagtgccttccattgattgagacacaagtttcacatcagtctctaagtgcctaacgtgtatccagccaataatcacactttagtcacttactttggagaatccttcatacctcaaccactagacatatcttcagtgaaacttcacagttaaaatatctcccgcctctgcttgaaggaaagaaatgccacagatgaaagtagtatgttttttcatagcgtttcctgcaaagcatctacacattggtgaaatataaccgtggcgcataattcacttctgtaataaaaataattatctaaatattatagttaagagagattttttctccctttaaaataaaggtcaatacattgcttcaatatcgttagctccactttcctatttggaacaaattttggaaaagcacacatcatcatggtcatttacttcagccatttggtgagttgcattaatctttgcaccttcttttgaaagataaaccacatttaatggtcttgctaaataatatagagctttcaaacatctgaagggcagcatggtaaggctccactagattgaactgggcattcacatcccatttataaagattcctaatgcatccttcattatcattctagtcactcattgagttccattataacttttattgattctattttcagcaggactctggggatgagacgaagaagtaattaagtagtttttcaaaggataaccactgtcacctaaaatcattaagggagaataaaaatgcctaccatcctctgccatatcaaaattaatttgtaataattaaaaagttatcttcctgaaacattaaaatttggaaaatttggagaaactggaaccatattgctaacttaaactgagcactttgggaatgcctgtgtagtcatgatttggtgtgcattcacatctgtcttggatatcagctatgtttcaggaatagctgcacccaagaaaatgttttctttaacaattaatgtcttatataaatactatgtacactttgagcatattcctgcacattacttagtagaaaattgatgttagctttaaagcattcaaataagttcagctaagagactgaaaaggaatagctctgcctaaaagaaatggcaaggtaggcagtatcatttttaaataaaaaatttaaatatgccccctggctctggtactttaattcaaggaattgtcatgctataaatgtgacaatgaaatgtgtaaacaggagccatgaaaatttacaagctgttaaaaatttgtgccaacagataagtgaatcctctgtagtagtatatggagggtctatctgacacagaagcaaacctgctcaaatcaagtcacacatgatcatttagaaaattaagtatggttggctctccataagtggtaggttcagatatttccttccatagatgtggccagccagtactttgcaggacaaacagtatatatatatttttcagaaaaggaggctgggtcatttaatccaaacaagactgaagacaagcttagtattctgccaacctactcctgctttaaccccaagaatgctataactgaaataattcatcagattattggtgcagtgattaacaaaattgtgttctttggagatgtatgagaggccatagagacaaaaacagagaaatagaggtaagtagaatagatatgatccctacatcaccattcaaaccaaaatagttaccctaataatgagcttctgtacaagataataaagacttctggtgctaaaagcaagttttaaaatatagatttattatcatatagataaagcccctcagttctgatggaaagaagttgcacaggggtctgtcaagttactagaaataggatcgggaagagaacctaatcctaggtcatagacatgaccgaaaggattcgtgaatgtgtgtcactctccatggtgctgatactcttcatttgcaagattgtttttaactcctaggatatggtgattccctcccaatttctcccatttttcagtttctttttttatttgtatattttaccctgtgagtaatttaccatattatattgttataaaacaaactgaactctgatgtataattcacaatatatgtaattatttgtcaattgtattacatttctagtacttgcaatctacatctaacacaccctctcacacacacagtcacacattttatgctttcataattcactgatgcttctttcattttgtgccaataatataataatttaaatagtaaattaatggcacaaaatgttggaaaacatttggacacttcctcctaagagaccactaaaaatggcctaaaatatcttatggaaataaccctgctctggaatcctactcaaaacataaagtctcaaaatattatcatggtaactttggatctctctttccagtgtggattcacattaaccaagctcagatgaaaaataaattttttggaggttaaatgattgagtctacgtggccagccattatttctcataagagaaataatgcagactcataagagaaacctaatcataatcaggttgccattttattaaataagtagaaacaaaattgtcttgaaggcagacttaaagtttttgttttctataaaacattactgcaaattagacactccatagaggcagacctgtgaatatatgctcgtatctttcttgttacactataatattgggagtttttatctttatataaatcttaactacaagacagtgcaggggcaaagactgtgttatgtccatctccttaccagtagacttaacacagtgcctcaatggtagagtgtgcagaacagatgtcattgaatgagttaatgatagaaaagtcgatttgaaagctagaacagtaaaaaataaagggggtgtctgggtgagggcagaagactaagtgacttaaaaatgactatgctcatcatgcattacaaggcataattaagtattcttgaatctaaggcaaacattattcttcaatcttatatcctccatatgcatagtcaaaatcgagaacacagggatgttggcatagtttgggatgttgctaaatagcatatttatactcctacacatctgttcttcactctatgacattggagctttgggttgggtggggcagttggaggaaaggagaaaagtaaggtcatcgcagttatgcctgagctccctgtctgtggggttgccatgggctggctgcatcccatggccaaaggtctcggtccctgtcaggccaccctctctccacagacttcattgaaagctgctggcaaacacaatccttatttctatttagggttaatgtcaaccttccctctccagtttgtgggtactccactctcccttgttgttgtctattacctacacgtacctttgcaaacatatttttaaatgctcttcaaaaaacctggtttgcatagaactaggttcctgccaggaccttgacccacttggggtaatcaaagaaatagtcgtataaatattcttgcatacaaggaatgtcattacaactctgtccatttccttagtatggcccataagatacacaagattttggagatcacttagccatatacaatgtttcatacacttagatactgtgacctattttctcactactgaactttgaaatttggagaagtgagaaaaactaggcatgaattatagatttttttagggataatatccaggacattactttaaaatatgacaagttagacctagaaatatcttacaaaggttgagagtatccaggtaagaatcttaataaagattcttaaagccatttgatttatatttttatttgcatgaattaaatgcacagatattaaatacaattccaaatctactaaagtttttttgtggttgtgttttaagtatttaaaattacatcttcaaattagtttaaattataaaattataatttaaattatttaataatttaataatttaaactattgaattataaaattacgtctttacattattttaaattactttaaaatatgacaagttagacctagaaatatcttagaatctgtcttttgctcattaaagactcctacaatgctaaaaatgttgagattctacatctagtcctttgattttttcataaacttttatatatttggcagttaattctgaatcctttaataaagattcttaaagccatttaatttatatttttatttgcacgaattcaatgcacaaatattaaatacaattccaaatctattaaagttattttgtggttgtgttttaagtatttaaaattacatctcatttggtgctgtattaaaatagaatggaattgtatgttatttcttttgagaaagctttgaatttctctaatctctccaagacaaattgacatcagcttgtagattctgttgcattttgtgtgtattttataacatggacccactattatcccaaattctggcatatgttttagaaaagatttttttcctactcttggaacgattgaaatctggagggtaaaatggcacttggttagaatgctgaaattgttaaacctccaatctcagcaccaaagttctgctcagaacagagcaatttcatgttttatttgtttttacccttgtggaaagaagaaaacaaaaacaattcaagtatatgtgttagactacaaatagagtgaaaacaggacatttcaaagggttaaataattagaattcggccgggcatggtggctcacgcctgtaatcccagcactttggaaggccgaggcgggcagatcacgaggtcaggagatcgagaccatcctggctaacatggtcaaaccccgtcactactaaaatacaaaaaaaattagccgggcgcggtggcgggcgcctgtagtcccagctactcaggaggctgaggcaggagaatggcatgaacccgggaggcggagcttgcagtgagccgagattgcaccactgcactccagcctgggtgacagagggagactccatctcaaaaaaaaaaaaaaagaaaaagaaaattagaattcagtgtgttcagggaaatattttggaataacaaatttattaaaatttggtgaggaatagaagagctaccatgaaattttccctttccaaagtccacagcaaacatgcattcataaagcatttattttaattattacatttctgaggcctacagttcacagtgttgtgtgacctgttacatttttctaatagaaaaaaatgaaatattgattttcaaacatgaaaggaaaatgattataaatataagtgggtcattgggggggaaataaaatgttaattccattttattatgttgaactttatgagcatttgaaccacatatcctgtaaaaccagagcaagcccagttataaggctcatatgaaaaacatatatgttgtcagttagcctcatgggagatatcaaagctctttttctacttaccttagttacggaaactccgcgagtatttccctaaggagggaaaaaaagagacagtgcagtaggttgactaagtttaagaatattatattgttcattgggttaacgaagggagaattgacaatgttaaagtaaaaaatcataagcccacttgctcactctccctcactctctaccttcccctacctctccttttactctcaactagcatttcatcccaggagatagtaccctgacttaaaagggtctgaagcataggaccaagctagttctctctagccactgctggcaaatagacagttcctggcatcagcacccttccctcacattatagtcacaaaataagatgcagctgcaggatctgtgctggaaatacccagagcaaaccttaagctcaggtaacctacacttagtagatgtagttaagctttccatagaattaagcatctcaggaggaattagttttaatgtttagaaccaaagccccaatagaagatacagtgctactttgccctgtaatagaaacttccttatagattctcagagcttttggatgtgatcatttcttgtgtcttcacatgatttaactattcttatatcacctaataaaacactaaaacagtatcattttatttcttataagagtcatgaagccttctctttttacaaaatgagtgaattttgaagaaaagaaatataattccctgatgttgctctataagatcaacaccaagcatgactagagtaagcatgaatgtcttgtgctctctcctgggcagtagttttgccagatagtggttgtctgtgtgcattagtgagatttttcattagaaacacttggaagctatataacaaaattcttccactcacttattttttcatcacaataggattgttaatgatgtggttttctagttcaccctagcacgagcccatcaaaaggccattattttctctgtacttaacaaggtgaagagttggtgccctctcaagttcaaaaaggaaaaataaaagtttattgtatatttgccatgctttacagtgaaaacttcctagggagaatgaattttggttataaccttacccattttattttccatctcacaccatgcaacaaatataaaaatgtttaggctctcatcctgctgaaccaatttctttattgcatttttgctccgaaaaagattaataatcatgttttcaaagtgatgctgcccactgtgaaacttattcccctgccatttctaaaaaatacatgccacagaaaagcttctgcttggattacagctaattcaaatataactatcctgacactccaattctttcccatgaaaaaaagaaatggataaaacgattgggcttttatgcacacttaaatgcattaacagtactagtaaaacctgatagaatttaaaatatgattacatatgaagtacattcaagatgaaaacttctcacactgattctattctaagcaacatagagaagcaactaaataatgaatttgaagaacaaaatcatatacttcagaagactcttcaaggtgttacattcaacatctaagacaaacaactgcattgcaaataaaaataacttgctactgtgaacttctactcatagttctaggaacagaaaataatctagtttacttttaacattattacgaacatacagacaaattgtatttttaggaaaaaatagtttcaaatagaggaatatgcaagtattgtaagtaaaaaggatttttttttttcaaagagagaaacatcaggatatatccattttcttccacatgtcctgagggataagttttccttgcctgagaaatgagatagctacaatcaacttggataaagaatatataattttaaattcctttagaattactcagttttactcgtaggaacattttaggaatgagacatcaaaaatatggtaagatttgttttaaaatcagcaatcagaatggcaaagccagagctccatatgctctctctccggcagctctgattacaaagacagagccataagcccttgaacacaatcaagaagaaaatttactgattgtttaatatctttagcattggtccttttgatcactcctctttgacatgtcacttctggcccttgatttttcttcacctactcagttcaacttctccttcttggttctttgcaaataattttttttctgttcattcaactcttacgttgcagcatcctttattattagcctttttaaacaacagtctaaaattatacaacttatgtattttcctatttgattattgcttttcttcttctagtagaatgtcatcttcccagggtggggacttggtctctttttctactgttgtatcctgtgtacctaggacattgcctagtgtcttcttttgtcatctttccaggtagtaatatactgatgacctcagaatctgtatcttctttttaattctctctctaaaattctagaccatatatctagcatcttgttgaatatctctacctggtaaccttatatttattcttttttacattaaaatatatttgacaatgattgtatatatttaaggtgcataatttcataatttgttacacatatacaccatgaaataatcacctcagtctaactatatgtgctttaaacttaatatgtcccaagtgaatttattgtgttctacgttcacaccctctttcaactcaaaatctccccttttttgaatatcccttttggttccaacatcaatttgatcacttagtccagaaactggaagttattctaagctctttttatatatttctcctacaatcagttggttgctaagtagtttttattctattatctaaatatctaaaaatgttctcactctctattcacattgccacaataggccaatttctcacccgaattattacttcctaaataagctttcagccttcattccatcctttatccacaatgctgccagaatgatttttcccattctctactctccttatgtctgggcttggccagcacaacaccagacttttaatggaaaaggattcagatttctctcttcctcacccacatgatcacccccttagacttagactcgtcaacactacatacaccaggaacattaaaaactgcactgtttatgtttcccttcatgcccttctttgccccatggcccattaagtattttttttttctttttcttttcgagacagggtcttgctatgtcacccaggctggagtgcagtggtgctatctctactcactgcaacatctgcctccagggttcaagcaattctcctgtctcagcctcccaagtagctgggattacaggcatatgccaccacgcccagctaatttttgtatttttagtagagacgagatttcactatgttggccaggctggtctcgaacccctgacctcaagtgatccccccgcctcagcctcccaaagttctgggattataggcgtgagccacggttcctggccatggcccagtaatttttatctacaatggcagagtgagcaaaaatggctttgaaatatcttctaaattatcttcagagttactttgtgaaacttgtctgtatcatttaagacacaagaaatgtgcttgttctaaactccaattttgaaaaataaatgaatgatcaattctttttactgataagtaggcattttaaaatcctctttgctcttcacttggatacttcagaagagaggttccctggcagtgtgcgagtgcttatgttatgatgctgcagaatctcacctttgacctggctggtatcagacatttgagtgcatagcacgaggattttcatagagtttacattgacaccgtgtttgggagtccttgaagaagcaggaaccaggtggcttcagtccccacctcatataaatgtctctgtaatcaacaccaatccccattcattactcatttaaccaagagctgggcaggcacccaggccatatctgaatgatttagctgggccatcacgcctatctaagaaggagagcaaagataccagaaaaagtttggctgtccatcaatggtcacaagttaacatgtgaccctaaggagaccaaaaacacagatatgaaataaaaatttaccttgaaaagaacataaagtcaaatcagcaatataaaggtaaaattgatgaggaaaaagaaaaacatgaaaatgagagaataaattgtcacttcagaagataatttgtgaagatctagcttaagaactaacaatactagatagagcaaagtcagtagccaatgtacagtagcaaaaattttttaattaaagagaaaatgttgaggtgatgagaatgagattcatacaggcaaatgtacagtgtgtgaattgtatgttaaatttattaatttcagtgatgaagaattttaccgatatgaaagggaaaagttacaaataagaacaaatttagattgttctcaaacttttctgtaatgaaaataaaggtcagaaaactggataaattacctacagagatataaaagataagacttatgattgatgaattctgtattctgtcaacttgttatttttatgtaaagacaacagaaaaatattatcagatatgtaagggctcaaaaagcataccactctcaaacatttcctggggaaataaaaaacacaggcatgctcctcttcaagataatttatctagagattcaaagaaagagtgttctaggctctgccttcccaggaagaattgtggaatgacatcctccaggaacagctgatatggtttggtccacatggttagtcctttttggagaactaagttacaaatgatgtaaatccctaaggccctgattccttaagtgactatcttttggcacaatatttttctacctagattcagagaagcagccagagtatacgacacaaaaaagcaacctataagctatgtcagtataggaaatgtgtctgttttgttcattgcagtgtctatagtacctagcatagtacctgctgcagatagataattattaaatatgtgtggttgaatgatttaaaggcaaggaggggaacagagatgtaccttctagcagcaagttctatttagtagaactcaataaacgtattggttgctattctgtgccaggtgctgactctagtgttgaaaagccaatgaatacagacagaaatacagatagagtacatgctgccctgtgttgttattttgtctatggttggaaagttcactgtattggaacattttgagtggaagctgggatgtgtccttttaatgccagtctccccagttaggaagagtcatccaggtatcacatcattttaaagtgattatgtggtgaaactcgctagactatcaatgcttaccagcccttgctgggtagataacttctctattctattaactggtcatatagagttaggtttgaggacaggaggaaaactgtgctaacataaaggtataatacattctgctcttggctgggcgcagtggctcatgcctgtaatcccaccattttgggaggccgaggcaggaggatcacctgaggtcaggagattgaaaccagcttggccaacatggtgaaaccctgtctctaaaatacaaaaattagccaggtgtgatgatgtgcacctgtaatctcagctactcgggaggctgaggcaggagaatagcttgaacccaggaggtggaggctgcagtgagccaagatcacaccactgcacttgacagagtgagactgtctcaaaaaaaaaaaaaaaaaaagaaagtcctgctcctgatgtagctgagatgttgtgtttaggcattaggacactttggtgagttgacatatattgtgatggcttctgtttaaaattcatatatggtgtttaacttctgctgggagggcagccacctagaacattctttctttggatataatcttaagtgagcaggaccattcacctttcttcttggctcaacaatgttgtagaaaaatagtgtgaaaactacctgataccttggaagcaaagatttcagtaatacttcaagaaagtgattatgtggaaaataaagcctgaagttctcaacagatcattctgagatctcgagagtggaaggggtgccattaccagaatcatcagcattaatgtagcttgtgcccatagatccatatgttctcaatagtcaagcactctagcgccacttattaagaggcaattctcttgccctccaaataacttcactatagaatggtagaaaaggaaacattctttcattgccttatgtaaagatagatagaacttggaaaaataatgttatcataagacagcatggccgggcttaaagaaagtttttttttttttaatactctaagttctagggtacattgtgcacaatatgcaggttggttacatatgtataatgtgccatgttggtgtgctgcactcattaacttgtcatttaacataaggtatatctcctaatgctatcctcccactcccatcaccccacgacaggccccgatgtgtgatgttccccaccctgtgtccaagtattctaagtgttcaattcccacctatgagtgagaacatgcggtgtttggtttttttgtccttgtggtagtttgctcagaatgatggtttccagctttatccatctccccgcaaaggacatgaactcatccttctttgtggctgcatagtattccatggtgtatatatgccacattttcttaatccagtctatcattgttggacatttgggttggttccaagtctttgctattgtgaatagtgccacactaaacatacgtgggcatgtatctttatagcagcatgatttacaatcctttgggtatatacccagtaatgggatggctgggtcaaatggtatttctagttctagatccctgaggaatcaccacactgtcttccacaatggttgaactagtttacagtcccaccaacagtgtaaaagtgttcctatttctccacatcctctccagcacctgttgtttcctgactttttaatgatcgccattctaactggtgtgagatggtatctcattgtggttttgatttgcatttctttgatggccaatgatgatgagcattttttcatgtgtcttttggctgcataaatgtcttcctctgagaagtgtctgttcatttcctttgcccactttttgatgaagttgttttttttttcttgcaagtttgtttaagttctttgtagattctggataatagccctttgtcagatgagtagattgcaaaaatgttctcccattctgtaggttgcctgttcactctgatggcagtttcttttgctgtgcagaagctctttagtttaattagatcccatttgtcaattttggcttttgttgccattgcttttggtgttttggacatgaagtccttgcccatgcctatgtcctgaatggtattgcctaggttttcttctagggtttttatggttttaggtctaacatgtaagtctttaatccatcttgaattaatttttgtataaagtgtaaggaagggatccagtttcagctttctacatagggttagccagttttcccagtaccatttattaaatagggaatcctttctccatttcttgtttttgtcaggttcatcaaagatcagatggttgtagatgtgtcatattatttttgagggctctgttctgttccattgatctctatttctgttttggtaccagtaccatgctgttttggttacttagccttgtagtatagtttgaagtcaggtagcctgatgcctccagctttgttcttttggcttaggattgtcttggcaatgcaggctcttttttgttccatatgaaatttaaagtatttttttccaattctgtgaagaaagtcattggaagcttgatggggatggcattgaatctataaattaccttgggcagtatggccattttcatgatattgattctttctatccatgagcatggaatgttcttctatttgtttgtgtcctcttttatttcattgagcagtggtttgtagctctccttgaagaggtccttcacatcccttgtaagttggattcctagatattttattctctttgaagcaattgtgaatgggagttcactcatgatttggctctctgtttgtttgttatttggtataagaatgcttgtgatttttgcacattgattttgtatcctgagactttgctgaatttgcttatcagcttaaggagattttgggctgagacgatgggggttttctaaatatacaatcatggccaaataggaacagctccagtctacagctcccagcatgagtgacgtaaaaaacaggtgatttctgcatttccaaccaaggtactgggttcatctcactggggcttgtcggacagtgggtgcaggacagtgggtgcagcccactgagcattagccgaagcagggcgaggcatcgcctcacccaggaagtgcaaggggtcagggaattccctttcctagccaagggtagctgtgacagacagcacctggaaaatcgggtcactcccaccctaatactgcgcttttccaatggtcttagcacaccaggagattatatcctgcacctggcttggagggtcccatgcccatggagactcgctcattgctagcacagcagtctgagatcgaactgcaaggtggcagcaaggctgggggaggggtccccgccattgctgaggtttgagtaggtaaacaaagtagcctggaagctcgaactgggtggagcccaccacagctcaaggaggcctgcctgcctctgtagactccacctctgggggcagggcatagccaaacaaaaggcagcagaaacctctgaagacttaaatgtccctgtctgacagctttgaagagagtagtggttctcccagcacaaagtttgagatctgagaacggacagactgcctcctcaagtgggtccctggcccctgagtagcctaactgggaggcatccccagtaggggcagactgacaccccacacagccgagtacccctctgagacggagcttccagaggaaaaatcaggcagcaacatttgctgttcagcaatattcactgtactgcagcctctgctgctgatacccaggagaaaaaggtctggagtggacctccagcaagctccaacagaactgcagctgagggtcctgactattagaaggaaaactaatgaacagaaaggacatccataccaaaaccccatctgtacgacaccatcatcaaggaccaaaggtagataaaaccacaaagatggggaaaaaacagagcagaacatctgaaaattctaaaaatcagagcgcctctccccctccaaaggaatgcagctcctcgctaacaatggaacaaagctggacggagaatgacctttaagagttgagagaagaaggcttcagatgatcaaacttctctgagctaaaggaggaatttcaaacccatcgtaaagaagctaaaaaccttgaaaaaagattagatgaatggctaactagaataaccaatgtagagaagtccttaaaagacctgatggagctgaaaaccatggcacgagaactacatgacaaatgcacaagcttcagtagccgatttgatcaactggaagaaagggtatcagtgactgaagatcaaatgaatgaaatgaagcaagaagagaagtttagagaaaaaagagaaaaaagaaagaaacaaaacttccaagaaatttgggactatgtgaaaagaccaaatctacgtctgattggtgtacctgaaagtgacggggagaatggaaccaagttagaaaacactctgcaggatattatccaggagaactttcccaacctagcaaggcaggccaacatttaaattcaggaaatacagagaatgccacaaagatactccttgagaagagcaactccaagacacataattgtcagattcaccaaagttgaaatgaaggaaaaaatgttaagggcagccagagagaaaggttgggttacccacaaagggaagcctatcagactaagagcggatctctcagcagaaattctacaagccagaagagagtaggggccaatattcaacattcttaaagaaaagaattttcaacccagaatttcatatccaggcaaactaagcttcataagtgaaggagaactaaaatcctttacagacaagcaaatgctgagagatttttgtcactaccaggcttgccctacaagagctcctgaaggaagcactaaacatggaaaggaacaactggtaccagccactgcaaaaacatgccaaattgtaaagaccatcaatgctaagaagaaactgcatcaactaacaagcaaaataaccagctaacatcataatgacaggatcaaattcacacataacaatattaaccttaaatgtaaatgggctaaatgctccaattaaaagacacagactagcaaattagataaagagtcaagacccatcagtgtgctgtattcaggagacccatcttacatgcagagacacacataggctcaaaataaaggggtggaggaagatctaccgagcaaatggagaataaaaaaaggcaggggttgcaatcctagtctctgataaaacagactttaaaccaaaaaagatcaaaagagacaaagaaggccattacagaatggtaaagggatgaattcaacaagaagagctaactatccgaaatatatatgcacccaatacaggagcacccagattcataaagcaagcccttagagaccaacaaagagacttagactcccacacaataataatgggagactttaacaccccactgtcaacattagacagatcaacgagacagaaagtcaacaaggatacccaggaattgaactcagctctgcaccaagtggacctaatagacatctacagaactctccaccccaaatcaacagaatatatattcttctcagcaccacatcgcacttattccaaaattaaccacatagttggaagtaaagcactcctcagcaaatgtaaaagaacagaaattataacaaactgtctctcagaccacagtgcaatcaaactagcactcaagattaagaaacgcactcaaaaccactcaactacatggaaactgaacaacctgctcctgaatgattactgggtacataacgaaatgaaggcagaaataaagatgttctttgaaaccagtgagaacaaagacacaacataccagaatctctgggacgcattgaaagcagtgtgtagagggaaatttatagcactaaatacccacaagagaaagcaggaaagatctaaaattgacaccctaacatcacaattgaaagaactagagaagcaagagcaaacacattcaaaagctagcagaaggcaagaaataactaagatcagagcagaactgaaggagacagagacacaaaaaacccttcaaaaatcaatgaatccaggagctggtttgttgaaaagatcaacaaaattgatagacctctagcaagactaataaagaagaaaagagagaagaatcaaatagatgcactaaaaaatgataaagaggatatcacctctgatcccacagaaatacaaactgccatcagagaatactataaacacctctacgcaaataaactagaaaatctagaagaaatggatacattcctcgacacatacaccctcccaagactaaaccaggaagaagttcaatctctgaatagaccaataacaggctctgaaattgaggcaataattaatagcctaccaaccaaaaaaggtccaggaccagacggattcacagccgaattctaccagaggtacaaggaggagctggtaccattccttctgaaactattccaatcaatagaaaaagagggaattctccctaactcattttatgaggccagcatcatcccgataccaaagcccagcagagacacaacaaaaaaagagacttttagaccaatatccctgatgaacatcgatgcaaaaatcctcaataaaatactggcaaaccgaatccagcacctcatcaaaaagcttatccaccatgatcaagtgggcttcatccctgggatgcaaggctggttcaacatatgcaaatcaataaacataatccggcatataaacagaaccaaagacaaaaaccacatgattatctcaatagatgcagaaaaggccttcaacaaaattcaacagcccttcatgctaaaaactctcaataaattagctattgatgggatgtatctcaaaatgaaaagagctatttatgacatacccacagccaatatcatactgaatgggcaaaaactggaaacattccctttgaaaactggcacaagacagggatgccctctctcaccactcctattcaacatagtgttggaagttctggctagggcagtcaggcaggagaaggaaataaagggtattcaattaggaaaagaggaagtcaaattgtccctgtttgcagatgacatgattaaagaaagttttaaaaatggttatatcagtatcagaaaaagtgaatacacatcagattatttaggaggccagtgatatcaagcagcagtaatttatgatacaacaccaaaagctttcccagataatgctgggcatctcagctactcaggaggcttaggcgggaggagcatttgaacccaggagtttaagtccagcctgggtaagaaaacaatgccctgtctctaaaaataataacaacaataaaaagcttttctcgataaaactgtaaatccaaagtagcccagaggtaatatgaaactgagtaccagaggaaggcaagaagggatattacaaaagcaagcaattcaataatggagcagcctgtattaattttgcagagtactttctttagctttagagtgttgtgcatttaatatgagagacttcactttaggaaatgtccatcttgagccagaacactggtttcttcactggtaataattaccaaatactggagaagttttttataaaattgacatgctggatgttttgtcttcctaggaatgcatcacagaatcatagatgaatcacttctttgaatgcttctgatgcaaccgttgcgtccacctctgatttggaatcaattattgtaattgagttgcagatatttcttattttactctcattgatgtggaacactgtttgtataactaactttggtgcatacacggagtcattcagacttattttgggggctctaacgttcctgcaaaatcttacatttgtgtttttgcatgtttgatagtctaaaaggttaatcttcttaatgtctcttcatgaaatacaaccatatattttcagtgcctgagtttgcatttatatttaggatccatattaaagaaaggtcaaatgatatcacagaattttgttgtagaattgaaggtttgtaacaattcatgtaatgaagatagatggcataatgaaatttttatgagaaaagtaactatataggctggatgttggctgtggcacacctctagaaggctagcctagccttcttcacatggcagactcgtccacatttatctaaatcaggttcaagtgtggatgaggctgccatgtgattattagctgttggaatttgaattgctgccattatatgtgtctcagtcagtttgagatgctattaaaaatactatagtcttagtggcttataaagaacagaattttatttctcacagttctagaggctggacaaccagggcaccagcatgtttgggtttggatgagggtactcttctgagttgtgaaagccaacttctccttatatcctcccatggaagaaagagactgagggctctcatggctcccttaataagggcacttatcccattcatgatggctctattctcataatccacctcctaataccatcacatcggaggttaagattttaacatatcggccgggtgcagtggctcacgcctgcaatcccagcactttgggaggctgaggcaggtggatcacgagatcaggagatcgagaccatcctggctaacacggtgaaaccctgtctctactaaaaatacaaaaaattagctgggcatggtggtgggtgcctgtagtcccagctattcgggaggctgaggcagaagaacggcctgaacccaggaggcggagcttgcagtgagctgagatcacaccactgcactccagcctgggtgacagagtgagactctgtctcaaaaaacaaaaaaaaaagattttaacatatcagttgtggggaggcacatttattccattgaatttgaccctggccccttaaaattcatgttcttcttacatgcaaaatacatttattccagtccaacatccccaaagtcttaatccttctcagcatcaagacaagaatataaagttcattgtctcatctaaatatcatccaaatcagatatgagtgacaccccatgtctaattcatcctaaggtgaaattcttctcctgctgtgaacctgtgaaatcaaacaagttatgtgcttccaaaacaagcaaagcgtagacattcccttttcaaatagaagatataggaaagaagaaaagggtgataaatctcaagtaagtccacatgctagcaagacaagttctatgagaactgaaggcttgagaataatcctttttggcttcatgccctgccttcaggtggtggtactgcacgtgcagccctgccaggcaggagtctcaaatctagagctctgtctgccaggtggcctactcctagggcattggagagcatccacctggccttttgtaagaaagacaatggtcccacctttcaaaaccaaggaagtagacttgatgacctctgaatcaccttggtggtcattctttctttgtcttgaagaatagtgcccatttgcagctgaatatttctataatcctaccacacagaattcaagaaatctaacagcttttcttcatttcatcccattttttgcccctttcagttcaaattagcagtttttctgcaggggtggtttggtaagcctgtagttcatacccattactaatctccttatcaaactgtcaattggctgcacccttactgttctcttccaaacatgctttctcactttttgcgatacagatgggctgagaattttccaaatatttaagttctagttctttttgcttaataattttaccttcaagtcacttttctcttctctcattttactgtataggaactgagcaaccttcaacaatttgctgagaattttcaccagctaagtatccaatttaattatgctaaatatacatttttattgctttcaagttctaccttccacagaacactagaacatgaacagaattctgccaaattctttgccactttgtaacagagattgcctttcctctagcttccaataataatgtcacttgattctgtctgagacctcatgacaatgaccttgaccatccatgtctttgccaacattctgttcatgattacttttgtattctccaagaaaatggaggctttgtctttagctcttctcttttcttcctgagtcctcaccagaatcacctttaaaagttctttttataacaatctaagcttctagcatgcacccgaaactcttccagcttctgcctattcctcagtttagagttgcttccacatttaaaattatttatctgagcattgaggtaatacccaataattttgaaaaattaaaaaaagacaaaaaaatcacaaatccaagaaactcagagaataccaagtaggctaacacacatacattttcaatctctctgtctctctccctctctctcacatgtacacacacaaatgcacacacacacacaccatattcactgccaaaaaacaaaacaaatacaatcttgaaggcatagatgggaaaaaatgtacattacatgcataataaactacaataattatagcgtattcacatcagaaattatgtgtgctagaaaataatgaagtgacatttttaatgtaatgaaaggaaaaagtcaatcaaggattctatatctagcaaatatatctttcaaaaatggagaaaaagaaaaagtctttttcagacaaacaggaatgagaaatgtcatcatgtggtgaactttcagtacaaaaaatgttaaaggaaaataagcagaaacaatatgattttagacaaaaacttggatctactgagataaagaatgctagaaataacataaagaagttaaataaaatatactttttaaccttattttcaaggttctaaagcagctttgtccaatagaatttctccaacaattaaattttatttctgtgccaccaataagactagccacatgtggctgttgaacacttgagatgtgtcaagtattactgaggaattgggttttaaattttatttaattttaattagtttaaactacccacatgtgtctagtgactacttttttagacttcaaccctaacacataatgaaagcaaaaaaagtagcaactgtgtttataatgtatattaaagaaaatgtattacaccaatgacataaatgaaaggaggaagaagtagaaaatataatcttatttaaaattcatgttcatgccagctttatacgtaatcagggaaaaaaatggaaacaacccaaatgtccctgaactggggaatgaataaacaaatcttagcacatttatacaacagaatagtgtccagcaatacaaaggaatgaactattgacaaaaacaacaataagaataaatctcaaatacaacacattaagtgacataagccaatgtctaaagactgcatatgacatggtttcatttatatggcattttggaaaggcaaagcatatgtgaagaaaaagatctgtgcttgctaggagttaaaaaggaagccttgaataaaaagggccacagaaatttacaccacaaggtaaaatttactgtactttaattattttttaattttaaaaatgaaaagccctattatatctaaagtaggaagagttataaaatagagtaatcattatattttaattttaatttatattaatgaactgtctttttaatgcctataatgtctaagtcatagttcatttccaaacgaaattattatgagtctagaatcagaagtgtggtttaaaatagtattttacacttcctgttaagtcgtcatcaattcaattaggttgctgatctagatattcattttcccactggtctttcaactaatgttcctcactcctatatggtgcctttatttcctctagtctttttacccagcaccctaatcctgctccagggtataggctctttctagtggatgtgtgtgagattcttccagctctccatgaagagtgagacaggaaagaaaaccccatccagtcacttcagccttaaagggccttctttgtttttccaatgagtataaaaatgtatgaatactacatagaacaaaagttatctctaaatgtaatacaagtgaagactctgaggaattctcctctaaagaaaactcttttttcttttttttgtcccagagctccccataatttttttttttactttgtaatcttttcttcagttttatttcataggactctgtggcatacagtatggaaaatgcctaagctgtgtttttttcacaggttatgagtgtaaaggtaaaaaccaccaagtgggagaaaaacagagccggaaacttgtctcctagatagaaatagcaatttttcccctttgttctgggtacaagtccaggaaaaaagggaagacaagtgaagctggaggtgacagaaattattcttatttttttttccttaaggagcacccattcagtattcttatttaatgaacgttcacaaagtgctagcattgaataaagcagatttgatttgtggttttatgaaggttacagtctaatatgaaccatccaaagagatgaacaaatcaaaattccaaatgaatatgtactatgaagcattaccaatcctataaaaattttcccttggtatgagtattgccaatatctttcaaatactctgattttcaatatagcttatttttcatctttgaatacttttttttttgctttatgtagccttctttatattcaggaaaatttcttgcttattctaattattcatcattatgtatgtaagaccaagggcaccttgattcagatagaatgttaacaggccacattctactctgtttgtctattatgcttggtaatactcaatatctataaggatgctgaagtacagaaaagaaatgctaaaataagataaatgaagggcagttgaccaaccccgaattgaatgcattttccgagttccatacaatggcaaattcatttctgtagataaaaaatgtattgctgaattcaacaacagcctagattcctggaatgatgccatttatatttatggaattaatatcaattattttatcataatttcaaattacacagagaatcaatttgtagaaactaagtccaagatcacccagtgtcaaaccagaagttaaaaggcaaaagcaagtgtgatttgaaaacacaagatgtgaagtggagatggcaggagttatcacacagggcaccaggaatctcagccaagccatgcaaggatgactgagaacagaagctcagctctttaggaatacaatgtaagaatcaggtagagccagcatcctggagtataggcacagtatctcctcaggttcagagacccacagaagaaacagagaaatcctgagcatccaagagaactgggctgaagggagcccagattgcagcctggctatttcatcggggcacttctaagaaccattaacctatatttgtattaaagcaggctttagccattcggtaacagtagcagtgattttttcagaaccctactagtaaatgatatataaatgtagatggcatgcaagaaccatggaagggggacaaaacatgactggtatatggaggtctcatctagatgagaaacacatgctatgcacattgttcttttctgctactgccaacttgacttctatcccaactctctagatcttagcatcttctgagatcttggcccattgttacttctctgattttagtttgttattctcctgtctgcagtttcttcagctaagttttctttgtcttacctgtgacaatttttgctagccactcggtctctcggctacctttgccatcccattcaggtcccatgggtacactcatctgtactcaacaaaacttagtgccccagaagacaggtgggaaatttcaagtctttcttgtgcctaaaaaccctaagtagatgtttttacttccatgtctttactttctaaagatgcctttacttcatatgaccttggtcataagttctaatgctagactactaccttcaagatagtccctatgacaatacagaacaaaagtgtttttacagacctatgtcctctaaatatcaagggacaaatctatcatctccttgacagagttttaatgttaatagagatgagttcattgcatcatttctttttctttttatttcttttttttcttttttttcttttttttttttttgtttttgagaccaagtctcactctgttgcccaggctggagtacagtggcgcaatctcagctcactgcaacttctgcctccaaggttctcatgattctcctacctcagcctcccaagcagctgggtttacaggcacccgccaccacaccctgctgatttttgtatttttagtagagtagggatttcaccatgttggccaggctagtctcaaactcctggcctcaggtaatcaacctgccttggcctcccaaagtgctaggattacaggcatgagccatcacacccagcccattgcatgatctctaactcccttctttacctccctgatttctgatttctggtgtttgtggttgtgtgtggatgtgtgaataaaggagaaaaaaatgtgtttttaaaacatgttctgcctatttgcatttcctaggcagttttttctgtctcacagctcaatggtgcctttggtggcccagaagtcaagaatctgtcaactttgataactggcctgtaagcttacaaccccttctagagttaacaaaagcccagggcttctagccatgaatgaaggtaatcacacggaaaaggaacagaatacgctagttactgtttaaaataaatacatgggaatttatgtaaccagtatgctaaactagcccaactggtgggatgcaatcacaaggtatttccacatacttcctttaactttgctctgtgggactagttttgccccagcaatgaaaagtctgatacttctgcatcttttgtagttacttttaagcaatggaaatccacaaatttcaagacacaaatcataaagtcaagttgctactgaaaattcccagtcccacatattagtaaaacttccaaattcatttaaagttacagttcctctccttccttcaactaagtactacttcaacttaaaaaaggcaaagaacagctaatttctattctcttcccaattcttcctcccccactaaatttccaacccctttggagctgtagcttaaaggcagaaggttggaagcaaaagcaaccagctgcgtgctcaacaaacccatttctccttcctgagtatcccacctcccttcatctagttagggccatgtgattaatttttattagtggaatgcaaatggaagtgatgaatagcggtcttaggtagcttagaatggaatttcttaagtgtgtcttttccatactttatttcattatctcccggccagatttagaaacacaatgaaacactgtaaggcagagtcaataaatgaaaggtggctaacttcgtcgatgatcagatagaaggagactgcccactcaacacccaattaagctatgatgggaatgagaaataaccatgattaggttgggggtcatttcttatggcagcttatgttacttacccaattgacactggcagagaggaagataagaaaggaagaaatatttatacttggctggcacaagtatggtgggtcttaggagataccctttggccattaattcatacctcttactaataatattctggactcaggtaatatattcttgccttatttgatacttacctctaccctttttggaatctgcagttatattcaacatctcccttacgatgcttgcctgagcatgtagtataatacccaactggcccactggaaatagtcatacatcctttgctctaacagactctcaaagtgaaggccattacacatcaccgtctcacctttactaccttcatttccaccactggagcagctttccagcctgcttttgctgtttagatttccaaatagaaaccagcttaatgtatcaaccttactgaaggggatgaatatcaattgtatatgagcatattagctttattttgtcaatttttgatagtaagaattcatgatctccaatttttccttttttacatggtctagtcatattttattgatgttaccatcttcctgaagttcactgagaaaactcaatgcatttaaaattatgaaagttagctagttttctgcattaaatctgtttttgatgctcattaatccctttcactagacttgagctatgagacaggatgccatgtccaagtccccttgatgggctggatttataggacaccagcaccttcctcaaaatgtcctttttacttcacaatgcacccgctaaccctctttgactcaatgtgaagcatttaagacgttttaaagtatattttcacctgaaccacttgaaactttccattttggtctggcacctgttttcagaatgttatatctattgcattttactatctatagtgaaaatttaaatacaattacatttacttggatgtagaatactagagctctcagtgagtttctctcagaactctctagacaatgctgggttatcatcaagcatttcatactgcaaatataaaaccacgtgttttagttcagttgtgttgctatagaggaatacctggctgggtgtggtggctcacacttgtaatcctagcactttgggaggccgaggcgggcggattgcctgaggtcagcagttcaagaccagcctggccaacatggtgaaactccatctccactaaaaatgaaaaaattagctcggcatggtggtgggcacctgtaatctcagctactccggaggctgaggcaggagaatcgcttgaacccaggagatggaggtcgcagtgagctgagatcatgccactgcactctagactgggcgacaaagtgagactccatctcaaaaaaaaaagaaggaataactgaggctggataattttcaaagaaaagaggtttatttggctcatggttttggaggcagtacaagaagcatggcactggcatctgcatctagagtgggcctgaaggtgcttccactcatggtggaaggaaaaggggagccagcatatgcagaggtcacctgggaaagaggaggcaagagagagaagggggaggtcccaggctctttttaacaatcagctctctggggaactctcttgagaactgatggagcaagaactcacgtagttccctcccacccagggagggcattaatctactcatgagagatccactcccaggatgcaaacacctctcattatgctctacctccaacattgggtattacttttcaacatgagatttggaggggtcaaacaaaccataaaaaacaccaagttcttaattgatctttctcactgtatgcatgtagagaattattgtcctaggcatccatatacttaatcagaattttttagtctgaagactcagatctttcttcaggaaaattatcttctattatcccttaaattattggttctattatattaacattgtactgtctttctggaaattctggtatataaatatcatgactctcagatgcatcttctacatttgttatcttttttctcatttctttttaatatctttctgaattcttagataattcctcaagttaatttactaatctctttgttagcaatatccattctgctcactgtgtgattttctggttaatttcagcaataatgttttatgctaaacactctggtacttcgatttttttcttttccatgaccatataatctctttgaatgcagcaacctttctaatctcactgaagatatgaataacaattttcttaacgttttccgtggtttgcatcattaatcttgtttttttgagggatattagaactcactgtcactattgcttccctcctttcagctgatttttttcaaaagtctgatgataaatattttactgtctgattatatacctacctccaaattaatgtccttagtagggttttttttaaatgggcccaaggaagagtagctattatcttttatttcaatggaaataataaaatgaattcccagaagtgcaaaaatcacactaatttttcatataaataaaaagttttttaaaaacctaaatatgaataaagtgaatattaaagagcaattttaccagccctgattaaaatgtaaattataattatgtaatcggaaaaacttagattggccatacaaaatcattctgaggaaggtgcctctaaatttgtcgtctagcaaaatacattctaaaattatgttctctctgattatattttaatgaaaagacaacaaaaagatgctctgtttctccttttcctagcctctgcccctctgtctcctactttctcatttcccaaattgcaataatctagaacaggtttattttgaagtcatgatcaggtgtgctgagacagagaagagagtatgggaagagtctcttttcctgagatcatacaagaggcaaaaaaaaagaagtttacaatactgtaatgtgtgcttaaaaattctgttaagagagcggatcttagtaagtgttcttaacacacacgtacaaacacgtacacatacaaaataaaacaaaacaaaaacctaaaggatggaaggaaacttgtagaggtgctagatatacttattaccttgattgtggctatggtttcacaggtgtattcataaatccaaactcatcaagttgtatatattaaatatgtgcagcttttaaataacaattaaagtgcaataaaactgttaaaataaataaataaatagactttgaaaaactttaaaagaagaagacagacggaagatgtgaatcctaaaggccttcaactccagagtggagtctgcttggtttgatagaaccaaggaggagaagcaactgaagagtaggctggagtttgttacatggaagaggccacatacatgttactcagcaaagagaaatcttaaactcattctagattaaacccaaagtgaaaatgatacttttggtcagctgagctgaacagactgtgttgtggcatagattcagagtaagatttttattttcagaattttaaaatactatgaattaattcagaaaatacaatattataatgaatgctataatggatttacttcagtgtctatttcagttgacggttcataacaatagagactgcattctaaatggaaggtcatcaggaattttaaagctagttttgtgatttcaacctgtagctaacatcaagggtctcaaaggattaggagttggagattataggagaaatacatttccttggaaaagtatcttcacctttcttccatacatgcacacagggatgaagggtgctttctcctgaccccaaacctagtgggaagggcttcaactacatcagtcagaagtttgcacaatgtactagggatttggaaacgtgggctagttcctggcccgagcctgaaaaacataaaggcttaggaattgtggcagcgcagctattctggtagtgacaccttgggatcagcctagatttccaaatgttactcaggttaaattttttttttaaaccagatgagggtcatacacccaaaaatgagagcatcatattgttccagttcctatctcagaactctattcaaagaggtaaaaagcctattttaaaaagaatttaggtatgactggcagctaaagaaggattcaccagcattcagtcagggcaaaataattcatttatgccaagagaactgcagacagtgaggaagagagagaactgaccttatcagtcaggatagactagaatagtggttctcagacaagggcaatttcatccccaagggctttttggtgaagtctgaagatagttttggtggaggagtgcatgggcaatgctgctggcatccagtggctagtggtcaggcatgtggctaaaagtcatacaatacatagcaaagcttcttacaacatagaatcatccagcagactgtcaacagcactaacactggcaaacctgagctggtgcatgctggttcaacaaataatcaccaaatcttagcagcttgtaagacaaaagtttacttcccatgtgtgctatgtctctattgcatgttggcttatggctctgctgcatgtgccttcctggcagaatccagccaccacttggaacatcaccagttgacatgacacagtgaaaagaaatatgttgagcaatacactaacttttaaagctcctcaaagaaatgacatccatctccccatctacatttcatttgccaaagcgagtgccctcgtctattggttagttattaccgcataacaaattacctcagaatttagtgtcttaaaactatgcagacttactttctgctagtttctacagatcagaaaaggggcacatcattgccagctcctcttctttaggttctctcaagagctgcaatcaaggtatcagccagaacctccaccatctgaaggttcaaaagggacaggatctgattttgagctcactcagtaattgttgggaggatccagttccccatgggctggtggaccgagggcctcatctcccttgtacacatttacccggagtctccaaagtccatgtattgttctcaggcctttgcatcctcatagcttagctccattaaaagtgggaacatatgatgtttggttttccattcctgggttatttcacttagaataatggtctccacctccatccaggttgctgcgaatgctattatttcatttatttttatgactgagtagtattccgtggtgtatacgtatgccacattttctttatccacctgttgactgatgagcatttgggctaattccatatttttgcaattgtgaattatgctgctataaacatgtgtgtacaaatgtctttttcatagaatgacttcttttcataggacctattttgaatatcaacataagacaccataatgataagtccagcatgcaagggacttctgcgtttaaaaatacatgtatggttgggaggccgaggcaggcagaacacttgatcccaggaattcaagatcagcctgggccacgaggcaaaaccctatctctataaaaaatacaaaaattaacgacatggtggcatgtgcctttcctgcaagctacttgggaggctgaggtaggaagagcacctgagcccaggagattgaggtggcagtgagccataatagcactactgcactccagcctgggtgacagagtaagaccctgtcacaataaaataaaataaaataaaatataaatgttaattaattaattagttaaatgtgtgacttgtttagaacgagtggctgatatagctttcatgagcactcatgtagattgccaatccctttttgctgaacttccttgaccttaaagcatggtgaggtggggtaagtgggtctgactcctatctctgacctacacatataggtggaaacaaaacagaggattcctccctaaatgcagctagaagcaattaggtaaaaatttaatttaatttaatttaatgtagaaattccttttctggtttcaacatggttggtctttctctaagggtattagctagaagtaggtaaccagctggtcttcctctgcaagggcgaggtgcttgagatgaaagatggacaggcttctcctcaggcgtattgcacacgaatacttttataggtgagctatcctgagctcacctggtagctgtaggctctcctaagcatagtgtagtccacaggaagcttctcaagagtgtggtcagcaatggtgggtctatgacacattactttcctgtcctcactcctcttacattactcttgcttgataattccttaagatttccattagttgaatgtcattttctgtgatttctcctaatgaggacagaaatttcttgtccaaatttcctgtgctatctctacagaaatttgaaaataggggagattctaaaacctttaccagccatacttcattttccagaacatactacattgttacatagaaagagctagaaataaaacagatataccatagatagccatcagtttctctttctctgtgtttatctatatgaaggttatagatggatatttatagaaacagaccaaatggttaatggttgttaactttgtgtagtagaataatatgcttcttttttcaaaagatctatttatacatttaaattttcttcctatgatcaaggaatgcttttatactaagtaaaaaaaaaatacaatttttctttaatttaaacaaataatagaatcacagcatgcaatttatctggggactgtgcatctaacagaggagctattttaaactaaagggataccaagaaatcaggagcttttgaagattcactttaaagtgttgctactcatgcttaacaaaaatgtttctacctagtaaattaatgtacaatgtgtatgcacactagaaatttattttgggacaatcataagaaactctattttatactgctcctaagtttgcaaatcgctttgaaatctcattttatttcatcattcaaatgaccagattaaagaaaggtcaagttttattaaccttgtttggatgtggaaagaagcacaaagcatcccatgataggcactgagagcagcagagccacaactctgactgccacacagttgctttctctacccagtagcctttactttcatgccttggtaggttggacaatatcaatgaagtaggaaaattatgccagcaactgatgtaggcctcattgctcagtacaggcaacatctcccctttattttagattcatagatctcttttcaggttttgaaatgtgattttcatggcagtaatgtcatgcatagtcctcttttcctaaataggaagtttataacttcattatggatatcttgcaaattttctgtttccttgaggaaaaaaatatttaactcagagaacctgatgatcttttttggatgaccatcgtgtaagtggagagtagaatcatttttggccatgagaagttgagaactcaattaagaataattaggactcaaacaaaagtgaaagctgatttaaaatgatttattttattttattttattattattatactttaagttttagggtacatgtgcacaacgtgcaggtttgttatatatgtatacatgtgccatgttggtgtgctgcacccattaactcgtcatttaacattaggtatatctcctaatgctatccctccccccttcccccaccccacaacaatccccggtgtgtgatgttccccttcctgtgtccatgtgttctcattgttcaattcccacctatgagtgagaacatgcggtgtttggttttttgtccttgtgatagtttgctgagaatgatggtttccagcttcatccatgtccctacaaaggacatgaacttatccttttttatagatgcatagtattccatggtgtaaatgtgccacattttcttaatccagtctatcattgttggacatttgggttggttccaagtctttactattgtgaatggtgccacaataaacatacgtgggcatgtgtctttatagcagcatgttttatagtcctttgggtatatacccagtaatgggatggctgggtcaaatgctatttctagttctagatccctgaggaatcgccacactgacttccacaatgattgaactagtttacagtcccaccaactgtgtaaaaattttcctatttctccacatcctctccagcacctgttgtttcctgactttttaatgatcgccattctaactggtgtgagatggtatctcattgtggttttgatttgcatttatttaaaatgattataccgacaagctgaaaactcaggcaagactaactttcgtattgctggtataatttaaataggcgaaatatttttaaagtctgttttgtagcaacaataccaagaaaaactactttaacaaatcatgctacatataggcagcatgctacacagaaagaatacatgtatatttacttcatagaagttctgctcaattatctagataagaggaaaacataataaatttaaaaaactactaatgctttttaaaaaatttagccctataattccaaagcagtttaaaagatgcattaacatgtaaccatcttaactttggaaatttcatgttttcattttcgtgatcttgtaacagtagatttgatgatgaatgagaaattgtcaatagacatagcaagtctaagggaaagattgtaaatattctatacgttgcaaaaaactatctttagttattgtaaacataagtgggtatgggagatggtgccctaagatgaattccgccaatttgtttcttttcatataaacatgctgcttctcatataaaaagtagaaactaatttccctagccttgaatcagtggcctaagtggctggcttggtcaacagagtgtagtgaacattctgggactcttgagccttgctcataagaaactttgtaacattctctggggaatcttgcagtgctcatttggagagctccatctgagaacccagatagcacgctgggagttgcctacataactcacagaggccacgtgcaagtgctccagtggtcagctgcagctgagctctcagcattccagctgagctctcagccttcagccaccatcatgtgagtcagccatttaacacgatcagctcatttggggagcagatgactccagctcctcacatctcactaccactgcatagacaaattctgagtgagaactacccaaatgaacacaattaacccagaaaacaatgaaagagagagtaatcaatggttgctttaagccaccatgttttgggattcatttattacatatcaatagataactaaaagagtaaggtatgaatattaagtaaataataaattggaaataagcaaaattcttcagaatgaatcagaaagtgtacctggctttggcttacgacacaaagtgtttaatgatttggggatcagtaacatactctctggtcctagttcttcatttttaaagtgaaaaatctgggatgttaaaaaagacagacagtgtaatcccagcactttgggaggcccagcaatcccagcacttacctgaggttgggagttcgagaccagcctgatcaacatggagaaacccccgtctctactaaaatacaaaattagctgaccgtggtggcgcatggctgtaatcccagctactcaggaggctgagacaggagaatcacttgaattcgggaggcagtgtttgtggtgagctgagattgcgccattgaactccagcctgggcaacaagagtgaaactccatctcaaaaaaaaaaaaaaaaaaaaaaaaacacagttcaaacacatgtgtggccttctgatgagtagatttctactcattctgcagtgaaggtcaatgtcaataagtgttcactgactttggacaaaaagtgtagactagattatcaaacaccttgttcctgaggacagaaatgataatcaggaaccaacataggtggacactgggcataaactaccaaaatcaactcatttaactgagtaactgagtatctttcaaggctgttaggctggtataccagagcatgtgatagacattgttcatctgtgacattgacttccttcagaaccttctggattatagtataacttttgtattactacttaaaatctttccactgggctcttctcaatgaacaatttcttgaaagtatttttaatcctgcacaaattctatacaaatcttaggctctcctctcatgctattggtttcatcactttccagccctcctcagaaagcctctcctgtctgtcctttcactagattttgggcctacatttccaaaagtaagagctattctagctcttaacaattgtttatatcactaccattctattgaaattgcatgtccaaagttgtccacaatattttagttcctaaatctaattaaccttttatctgttttcttctctactttatctctatagcatggaaccaggctgacagttttctcattccccattctctcctttatcgacttccatggcactttcggctctctttgtattgctcctactgcttctactctattatctgctgtgtctcctattgttctcttaaacataatcatgtttacttggtccctttcattcccttttattctctttttctcaatgtgatttctgtccagttatttactcattattttctctataagaatggtatggtaactgatatcaaatttttcctttgctaatttttaggcactaaatatgtcctgaaatttcattttaatcccaagggtccagaacctgattagatggtcttaaaatgggattatagtcaaaagacttggggatatctaaatcattttctatttcagccatccttcctccctgtgatttcatggaggaaaggtatatttacacaagaataatggcaagtgagaaacaaggcatcactcaattattatgatctaggcttgtaccctcagataatgtagggctttctggtaagcagggcttggagttgatgtccaaaaatgactaaaacttaacattgatcagtaccttctttaaacaatttgttcttttcattacaaagagaaagaataagataactgtatctaccccaaggaggcagaccctggctcattttgcttattctattgcatgaatgaaaagaaatcccagagaatttgaggaagaaaggaaaacagagtgaggcatgtctatgtttatgaacatctgatgtagtataacgcaatttctcaataactaggcaaaatcatttttctggaatctgatttaatcagactagtattccccttacccagagtgggaatatgtggagagtggacaagggcaaaaggtaagacctcctgcttctaggtcctacttctcttggcagggaatactcatggcccctcgtctcattgtcactgtaattttcagtttatgcattgatctccactctgtactctgctgtttgcttgcttaatattctaggactgaagcccagctcattcatctggtggcctagttcttgccaatttcatcaataaaatattctgaatcttaccttcagtatttccatccactctgtggagtcatgccttgatattcccagatttcaatattgctcaagctgaccatacatagtatatatactacctgcaatttcttgctcttttaacctttctgtagaatcagaatataagcttgcataaaaatgtcagtttggcatattctttggccctgtgccttcaaataccggtctgtctttgctgtggataattccatttctgaggtgggttttcaatttgccctggggagtgggtctctgcttcacctcagtagccatctgtcattggatgctgcacatccaatcctgtgttttttatgataaactcaacatgagtcagtactgttctgaagactcccagaaaagggtttccactttaaactgcatcaatatgctatatatgtagtattttgagatttggattatttccctctcactcccagtaatttctgcttacaacatgaccgtccatcttttagaccattaaataatgaagaatctattgtttcaagaaagagttattacaactgaatacaggaggcaaaaagaacacaatgaatggttattgaaatgtgtgagaggcaaagacttagacttctcacacttaggccttaggctttaaagttcactagaaataattcattttgaagaactatttattcaaaggcttttatttttctattgatcttgagaaatgttatgatcccttagaggagacaaggatgccagaagatccaggcattttagaaaatcttgtaagagcagaagttttggacatacttcccagcagaatccaggagaatataattgctatttccccataccccattgtgatatgaggatattagtagtagaagtggttatatgcattgtcatggcacatacagtttctgtgaaactgtaattattatatcagagagagcttcccatcaaagcacagtaatggatgaaaaccctgcaaaattatagaggaagaggaaaaaaatttgaaaataatctggggttcactagttgatctttcaataacatttgttgtctgcctactctgtacaggtctgaacttcgcttcttgtaagttcattgttttacacttttattcctctaagtatccattttatttatacttcaacttgcatatgactttgaagcccatcacaaaatgactaaaaaagggggctcaatgtggcagtctgggcagtagatgaatcactctgtcttctgctactccaggactcatatgcagcttaaatctttagttgttagaaatcttaggtaatttgaagagtatataccatctttgttgagaacacagcttcaaacaccaaggagatttagatttaaatagccaaagttaacagaattcaagaaacagaaatggaaactattttagctatgttaagcataaagggatttattactgggaattgggcctttaaacaatccctggaagagttgaagggcttggctctagacagggtccagaggaaagcttctcagaagagtaactctgaactgtgtctccagaagagttgtaacctcctttccatcagaaagatgtgaaatctggacctattactagaactgctgagttcaggatcacatcactgtagaagagaaagagagatttgggaagctgctgctgccaccacaccattgcctcaccaaactcacagagctagtacctagatacaaccatgcttttaagcagcaacagaaatatgtgtaagaagatggccctgttcttatttaggttttaaaaatctgattcaagtacctctatatgatgaaataattttgcacttaggaccctgattgtaaggacatctgggaactgtagatttcggatgtctagaccctacagtacagatggatcaccagaaagaggcaaaaatgcgttatctagctccacatatacttgtcatcataatagatatgcatttaataattagagtagttattattttgagacaatcaaaatcatgtagtaatattttgtgcttaaatagtacctgttaattgatattgtatgtacctataatgtttaatattatgtattttaatattcatactatttatatttttagtaaatctacatatttttaatgtggcctattagaataaccatattgaactctaattttagaatttgtaattaagctataaatttacaaatggaattttgtttaatattactaaatgtatttagagtgttggatcacctaaaagaattttgcattcactgtattcataaagttatttattgcatttataagaattatataataatatggtagattttctatctaatcagacaatgaaatttatggagaaaatcaaacatatagaatgtataattatgttttgaaatgtgaaagtaattaaactgtttaaataggacaaaacattgttcatattatgtacaagctgactgcaatacttgaaaatataataagatttataatctaagtttaaaagattaagaaagcacaagggatttaaatttgaactttcataatttgcatgctaaatcttaaaaatgaaataaaagcccaaacatataaagaagtattaatacacattttttacaaactctcccaaaaattaaagaagaaaacaattctcaactaatcctttgagaccattattgcctcaatatcagaagcaaaggtacacagtaaaagaaaactatagaccaacatagatgcaaaaatcctcgccaaaatactggaaaaatgagtctagtaacatataaaaaagattatccatcatcaaccagtgggattattcccagaaatgcaaagttggcttaatatctgaaatcaatcaatgtaacccaccatatcaatagttaaaaagcaaaaatcacaacatcattgcaataaaagcagaaaaaaccacttaatcaaatcaaatgctctgtcattataagaaccatcaacaaactatgattgggaaaaactttttaaacttcacaaggggcatagacaaaaactccagggttaagcctctaaaatgaggaacaagacaaggataactgctctttccattgttatttaacatcatactggaaattctaaccaagacaaagaggcaaaagtaagaaagtaagtagaaagaaaaacaggagggaaggggaggggaggggagagaagggaagggaaaaaggaaggaagaaaatgcctccagattgaaaaggagacagtgaaattatctctatttactagtgacataatctggtatataaaaatattggccgactgtgcctgtaatcccagcactttggaaggctgaggcaggtggatcataaggtcagatgttcgagaccagcctggccaatatggtgaaaccccatctctactaaaaatacaaaaattagccaggtgtggtggcacatgcctgtagtcccagctactcgggaggctgaggcagaagaatcgcttgaacccgggaggcggaggttgcagtgagccgagaccgcaacactgcactccagcctgggcaacaacagagcaagactccatctcaaaaaacaaaaatcttaaaaatcctggaattgggttttgatttcctccagtatgtcagtgatcttcatttctatctatatttgaattctgcttatgttacttcagcaatctcagtctggttaagaatcgttgctaacgaaataatatggttgtttggaggtaagaagacaccttggcttttgagttgccagagttcttgctctgattctttctcatctttatgagctgatattccttgttccttcagtctttgaacttgctgcttatgtatcctgatcctgaaataaaagttaaaacaattaaaataataagaaattcaccaaaaagtattaaaataataaacgaggtaacaatatttcaggatggaaaatcaatatagagaaaacaattgtatttctatatattaacaatgaacaatctaaactaaaaatgaaattaagaaaaaaactgatttataatataattaaaaagaaagaatttgggaattaatttaacaagacaagtgcaatatttgaattctgaatgctacaatacgttattgaaataaattaaagaagacataaacaaatgttaagatatctcatgttcatggaacagataacatcccaaacttatctgcagattcaaatcaaatcctttaaaaattcccagctgccctattttttttttttttcagaaattgacgaaccaatcctaaaatttatgtggaaatgcaggggatctagaatagcaaaatcagtcttgaaaaaggaaacatgaatttggaagactcacgtttctggatttaaaaacatactgcaagctacagtaatcaagacagtgtagtactggtataaaaatagacatgtagatctatggattacagtagagacccgggaagtaaaactgcacattagtgaccaattgattttccatgaaagtgtcgagaaaattcagtacaaaagattttttcaacaaatgttactagaaacaatgcatatccacatgccaaagaaagaatttgtactctttgtttgcactgtacaaaaattaagtcaaaatggattatagatatatatggaatagctaaaattataaagttattagacaaaaacattcgtataaatctttgtgaccttggattgagcaataatgtcttagagacaacattaaaagcacaagtgacaagaccaaaaaaaaaccagaatttttttcaaaattaaaaacttttggcagggcgtggtggctcacgtctgtaattccagcactttgggaggccaaggcgggcggatcacgaggtcaggaaatcgagaccatcctggctaacacggttctctactaaaaatacaaaaaaaattagctgggcgtggttgcaggcgcctgtagtcccagctacttaggaggctgaggcaggagaatggcgtgaaccagggaggcggagcttgcagtgagccgagattgcgccactgcactccagcctgggcgacagagcaaaactccgtctcgaaacaaaacaaaacaaaaaacaaacaaacaaaaaaacaacaacttttgcgctgcaaatgacaccatagaaggaaaagacaacccacagaatggaataaagtattttacaaattttgtatctgatacagaattatatacagaatatataaaaacatttacacctcaataatataaatttgaataatgtaatttttaaatggacagaagatctgaataaatgtatttttaaagaagatatacaaatggcaaataagcacacatgaaaagatgcttatcatcatccattaggtaaatgcaaatgaaaaccaaaaggagataccaaatcacacctattaggatggctataatcaaaaataaaaataataacatgttggcaaggatgcggataaattgaaatcctcatacattgctgatgggaatgtaaaatgatgcagtcactttggaaaacagtttgtcatctccttaaaataataagcagagttaccacgtgaccaggcaattccactcttaggtgtatactcaagaggaattataacacattcgatacacaggtgttcacagcagcattattcataattaattgcctaaagtggaaataacatatctattaattgataaatggattaaaaatgtggtatatccagaaaaagtaatattatttagtaattttttaaaaaatgaagtaccgatacatgatacagtatcatggatactgtggatcaaccttgaaaatattcgaagtgaaagagggcagttacaaaagactacatatattattattccatttatatgacatgtccaaaattggcaactatatagagatagaaactagactagtggtttactatggctaagaaggggaggggcgattaatggtttgagggaggagggaataagaagaatgacaaatgactgctaatgggtacagaatgtcttttggggtaatgaaaatgttctaaaaatagatagtggtgatagttgctcaactatgaacatattaaaaagtattgaattgtatactttaaatgggaaaaatgattctaaacaaataatattctaaaaagtattttctgttatccaaagtttgaggctaccaaaaaaatttagcaattgtttctgtttataagctttagaatttttttctttttagacttgtcatatttttcttaatatgaatattctaactttttaaattagtttttgtcagtgtaaaagagtctgaaagtattctacatgcaattaaaatgtagtttgtatcttaaacacaatggatcttcagagaatagatactttacaagtgcaattattttcctcaaaattgtaaagttgaaaactggaaagtataaactcaatacagacaaaatactttcaatggtgttctttgacaaatttttcactcactggcatataactatgttctacttctatttttgaatgagccaatattatttttttttgcagaatatcttccattttggggatttattaatttattcatatttacctttgcatctgttgatattaactccattcttattcctaattttgaatacttttttattttctctctttttttgtctagccctaccgcctgtgtacatatatataattttatatatgtatttatttatctataactaccctttgaactatacatagaaggagatataattatattaaaatggttcaagttctacatgactttaaaataaaaaaatattaaacttaactttactggagtttaacagcaacaaaagaagaaataagtaaaactgtaggaactgctgaacatcagaaaatgctttctttactttgagaaatatttgttcctaaaaaattcccctaggccatatatagaaaactgatggctttgggacctaacacagcatacagatacttttttgttgctgctttttggcctgcctagtgtaggcctacacagtgttcaaaatttgaattagttgtcaacattttaaaataaggagttttctcatacaaatctggatccaacgtgtaccataattggaagctccggcaatgccatcccacagtcccacatggcaggggcctgcaggagctaaggagcagcaggttctttacatggagaccgtactctccctttcagcccagctcacaacgtctctctgtttccccagcacggccctgggtgtcagttactggttgccatctatcatcttacacatttctgccttattgattcaattacttctaggcttttgattttgtattctcaactcttggctattcatattactgtattagttgtcaatgacattgacccatctcgttcttagtatttgttcctgctgctgtcatcttctgcatctcctgtcatctaaagccaccaaatacctattatttctctatcccttccagttctctgctctgtacagcgtaatgttacatcagataatgttaaccatttctcagtgtcttgttaactcactccctttggtgtcctgcagttaacctagcacacccatgtccactaattcttctcttactgaagtgaagatagggtatcttccactagaacaccccacactaaatcatggtactcaggtagtccaaacagtacttaaactgcatatcatcgctatctcttgtcttagaaaattactactctccttttgtttcgtctaagcaatgtctcttttaggaattatgttcctatctgcatttgtatatcatgcaattattaactttatatataaatttcaaggtgcatttgaatacacgtaacagaaaacccgcttccaatttctttgaagaataaagaactgtattggcttatataaaagtacagggtagggcacattgattcagtggccacagttctatttttgttgttttttagtttccttagacacatgaatgaacacagtcatgctgtcaggaagaggaaaaggaagactgataaatagtaagtattcagcaatattcaccacaatcaaatggttcagccaccacatgtacacgtatatctttcctcctatatgtagataccacatcctcttggacaagaatatacctgaaagagaaatgagatccttggttagccaaattggcagtacttagttccactggtaggatggatctctgtctattttctttcatgaccgcattgaaaatggacatggaagagtgtgtcctttctagagatggtgtgacgtttgtagtccagtcccagtaggtgcaaatctgagggactggagatgtcctgtgtttgagcagttaaagactgttttgagccaggcctggaatatctttggcagtacagctcccttaaaaagttagtaggctttgatcttttgcatgcaaaaaattagcaagcatggtctccacagtagtttatctggtcaaagtctgattctgatcatttcattttcttcgcaacaagcttctgtttgctgtccattcctttggaccttgattggcacctttatcttaaccgctgcctcggagcaattaaaaaaaaacccttaggtacaaggacaccataactttcataattacccccagattaaattctatctgcatattctgaatggcatggctaactacttcatcggttgggaatgtttagcagaattttcttgagagaggtctgaagagtaggctcacgttgtatactaatcttgtcaaccttccaggtctcctattatcctgaattgttaacaaaaacttcaccttggggataagacttggcattcctttccctatcaaactccacattagtgtatttgaaataatttgcttttccgagcagaggcagaaaagaatgatattttcttccataccttctcttatttgcagaacgttcaatttaagccaatccagtatctatactgtagacctcagtgaaggctggaagactaatccaacacaatctgacatcctgattctttccaatcacctttatgttccaccctctgtgagtacataatcatttcctaaggcagaagaagtgttgttataaattacttttctataactgcataacaaagaccatcaacttcctagtttaagaggaaggtatccttttcactgacctcttttaccttgattcagcaccatacacttgccatcatgttttctacccactcagagcacaatagctgcaagtaacagaaaaccaggtcagagtatcttaaacaataagaaaaaaaactgaatctcataaactgaagtcagagctagggtgggcttcacaaagctaccatgatatccttcctagactgatgcaattccctgataccttgtctgtgtacatctgaatgtgtcccctacatcacttctccatatagcagtcacagcgatctgttgaaaattaaaattagattatgttcttccctgatcaaaacactctactgacttctcatcgcaattataataaaatccttaatccttcccatagccacagacactattaggacccctttagagctcccctctagatttcttacgccacctatgtaataggacccctctaaagctctctagtcctatctgctgatgctcgtctctcactcactccacactggctatagtatcccattttgatgtttcttcattgtgacaagcttgttcctttcttaggaccttgacatttgctactgcataggcccagaatgctcctacatggagccttgcaggcaccacttactgtattatcagagttctccagagaaacagaaccaatatgatttgtgtgtatatatagaaaaagatttattgtaagtaattgactcgtgattatggaggctggcaagtctaaaatctgcaatattggccagcagcctggagacccaggacagccgacggtacagacaaattttgaatgccatctgttggagatttccctttttgttctattcaggctttcagctgattggatgaggaccacccacattatggaggccattcttgtttactcaaaggtcatggatttaaatgtcagtctcatccaaaaatatctttcatgttgacacataaaattcaccatcacactcacatactctttcagatctgtgctcattcatgacctttcaaaaagaaattcctcaaagcccctattgaaaaattccactaatttctgtgtcttctatacctttatcatattttacttcacttcatagcttttttcaacatctaaacttatattacatatttatttgttatgtacctgttacctacctccatttctataatacaggcattattcttgtttaccaccatttctatgggatacaaacagtaattatatagtagatgcttaataaactcgagtcaaacttttatattcacctgggaatcaaatgcagtccttcttatccaggagatggctcagaataattgaaattacacagaataattgaaatacacacaaaaaattgaaagatttttctaaatcatattggctacagtgtgtatttttctactttctctcaccccacccttctctgctctgaaatactgagaataggggtatacaaaatgcattccttagcctttcttgacagcagacctctactcacatcattccaagagaagacactagtggagggatgagattgtctcacgggagaagctattgttcttttctcttgctcttcttctggcagcatttttgagtgactacatcctttccacccaacagcaatccaccttcagcttcaatggtccctcttgcatggttctaggacaagctgcaggccttcttcgtcatggtttcagcactgtctaaactagctaccctagcagggaagcactgagtgttcttctgggctctgattacaccgttttgtcacttttgttttccaagaacttgatgaagcagccactgtcagcaattactaatctgtggtgtactttttattttacttctctcagactcaatacaatgtaacaaggctcctgaattagacctctaaattacagtctattgttttaaaacaataaggtactctcctttgtttttgtttttgtcttgttaattcagtgatgtgattcttgggttaggtagcttgtacagtttgaatataatgatgaccttattacccatggaaaatgggttactgctaatccatgacatgccatgacatcacatttaccaaattatctgttgtggctttattcaaagtttatttttctgtttatttatttatttgttagatatggagtcttgccctatcactcagtctagctggtcttaaattcctggcctcttggctggtcttaaacttctggcccacctctgcctcctgagtagctggatctataggagtgagccactgcattcagcttatctgttgttgctttagataaaaggccttcttaaggcaaggctctgtaaaataaagtggtcaatgcattcaactgccgtaatagtgatgatgactactaaagactgtggggaaagattttttttctctaatactgcactagattgcttatagaaacaaaattacaagcccagtgctttaaaatcttagttcaaggcaggtcagggaaccagggaaatttcactgtggtcttaaaatatttgctcatttattgtagtttcagggaagatcacaaatcccatcccaaatctaaaagtgaaaattccagaattacaatgtaagttgaatttactgcctcatcatgtatcttatgtgaaactaaaagcacatgatcttgtgtatattttagagcattaattgggaaagaatgggactctggggtttgaaatagggatatttgggtagatggaggtgaatccgacgaccctgaaccctcaaatctcattgaactttctattgctagcagaaatagtctcccatattcaaggatattagtctttttttttttttttttttagttcaaggccctgcaattacctcccctaaggaagttactttcaagtggatgcctgttcataagacctatccccaccatgcttcactgccttcaaaactgcagtttgagtctgattttagcaaacacctggggcacaagtatacaatcttacccagggaaatgtgacttaaatacaaaaagttattgtaagagtattattagttttactcattttagctaaaatttggagaatatgtgtgggaaagattctaaagattttggaagaaagaaagatttacagagattctttttgccatgtgctatcttgagtagctaggaatggctcaactgtggacacaacatcagactttaatgtggcttatatttaataatgttgagaatgtacaacttcttggcataaaagtgaagaaaaattctacagctttgggatacaaaaataacagactgcatttgtgatttgcgacttggtcattccctgtcacacataacactcccttcattcaggttttgagaaatgcattagtgagagaagtactagaatcctcaaaactgtgattgaggtggtgaatatgaatacagatggaagaagatggcttatgaactgataatcgttgaagctgagtgctggggtaatagtggaataattatgctatttctattcttttatataattttataattatccataggaaaattaaaggagatgagttttgtggtggctgtcttttgttggctggggatgatattggaaaacaccaactttgaaacaggctccctagctttagtggaaatcatgaaattcctaaataacagaagcttagtgaaaatgcttaactaccacagaaaatgtgtacatgatgacctggtctgttgatgtcatctagattgcaatttcctagactctttagggcttgatcaatgggctcatgtataaagtggccacagaagcaagtatagagattctgcaagggctcaacaatatagaccttctcttaccaaagcgatttgactaccatccttgctgtgtgcaggcacaagtttaacagcagaggtccagctcatatcccgatatggcactattccttggggagaccaggcaaccacctggtatcagagtgattgctctgccatttattttgggtatttcatctgctttttctgcttccagtgcctcttctagcaccaacattttttttattatgaaaataagccctcacaaagaacagggctcatagttgcaggcacaagggaaaatggttgttaatttctcttcttatttactgtattagggtaaaacaatatcatatatgatgtctaataagaactgatactacgtggtatatggaaacactcgaaatgtagattattgtcccttagctggtgccagaagccaccatcagaaggcctttggcgtgtcatattcaccatcaagacgttctgtactacattgcttctgaccaaagaacttattacaaagcaaaagaagtgcagcaatggtgtcacacaattccctgatcttactacatacttattggcttagaagcagctgccttaacagaaacataaaatgccctactgacatattagatactgtgccagctgagagacaataatttacaaatgtaggatgtttccatacactatgtagtatcagcttttactagacatcatatatgatattgttttaccctaatacattaaagaaagagaagtgaacagctattttcccccaatgcccacaattgtaggctgtgtttgttgtgagggcttattttcataataaaaaatgtttcaaatgttggatataattctttcattgaaatggaagttgatccactacccggccattttgggtccttattctactgaaccaacagaaaaataaggaattaccatgatttttcagtgattgatcctgattaccaaggagaagttgagttgctgctctatagtggagacagagagaattatatctggaatgaaggaggtttcctgaagcgctctaaagttcaatgggaataattgttagaagcttagacaacccaaagaggctactccactaaggactcagaccttcagcaatgaagatttggctcattcccatcaagtgaggacgatattaactgagattgtggctgggggcaaagtatcatggaatgggtggtagataaagaaagttattctaatgtgagtactaaagcataccactatatatgtgaatatgtgaactactgtttttttttcctttatctcttttaatataaggagtaaagatagtggttaaatttacagtttaatctttttttgtttgtttgttttgttttgacggaatcttgctctgtcacccaggctggagtgcagtggtgtgatctcagctcactgcaacctccgcctcccggtttcaagcaattcttctgccttagcttcccaagtagctgggactacaggcacatgctaccacacacggttaatttttgtatttttagtagagacgggctttcaccatattgaccaggctggtctcacactcctgacctcaggtaatctgcctgcctcagcctcccaaagtgctgcgattacatccgtgagccaccgcacccgacctacaatttaatctttaatgacggagtatctggatggacttgtgactttggatgaaaactcataggtggcatataagtcataagattttgcctattccacttttggggacaatgtgagggtatctttcattatataaagagtggatgcatcttgatcaggagaaacatcatgtcattgtctttttagttgtattaaaatttaagtacagtgaaaagggtgtatatggaggctgagttgccaaagagttgaaagtgttgattatttgactactttgccgcttttcccaccattctttaattttgttcataattctatggttggggaatctggatattaaattttctaggctctgtttccagctggtttcttaagttatatccataggagacactgggagaagacaggaaggcaggaagagaggagatgctattgtagtgtgacatctttctttctctttctggtagcacctctggatttagatgcactccttcaaggaccatgggttctgcaacagtaccccctctccattgttccagctctgactcagatgggccctccttgatggcactcccagcagcacagccttagcactggtaagacatctcttctcttgtggttcataccctagcagcagtagatgtttcctaacgttgctaatcgttggtttttttcattttttcttcttcactctcccaacttttctaacacctgcataatcagttccttattttaaattctacgtgtttgaactgtctacagttgtttacctttttcttcctgggcttggactgatacagtcataaaacgactgatttatttccttgctctacactaaaatgcaattaagattgaaagaaaagtggacatttcttctattagctctctttagaagttagttatttttcagaatccattaaaaacttctgtttttgttccatgctcccaaactccataatatgtcaatttctatatcaaaatctgtgaccatagaatgaaatacggcaatgagctaaggcctgaatttctcaaccaatgcctgtggaagtccagttagacaaggtcggctcctggagccagaggtgagattaacctcaggctaaagcatgtgggctgcattatggaaaggtgtacagttgttagagtgggaatagatgggaatagacattggataatccataaatagtgtgctctgtgcactctcattacattatattgcatttatctcgagttgtcagtttgtctcattaaagtatgagactgttaatggtacaaactgtgtcttttacctaaataatcaacattgagaattgtggctgtcacccaatacacaagtgtcaaaattgtcttgaatggaggaatgaatcaatgtgccagagcttttgaataaggttgagtttaacaagattgggtttgagcctttagtaagaatgtcataataatacacaatgtaaacaggcactggaacaatagtgtttgtagaattggagatctattagttcagtggcatttatattttttaatcagccaaacactttttcaaatgaaatactacaggaaaataatgtgtgtgtgcatgtgtgcatttgtatgtaaataaggacatttctatgtctttgaaattacctctgtagaggtaggtggtttaaaactttgttcgatggaacatatatttttttctaactccctaaagctcctttgcaaagtatattggtgcatgtgttacaagttaaaaaaaaaaaaaggaatttcttcaaccacgtccaagctgagttaagttgacttatacaaaggaattgtttctcttccatcagcagggaggtatcagagtgctgggaagagcagtatggaccatggagtcagactgcataggctataaacccacctgtaccacctgccaactctatgacatggtacaataattatactcagaacctcaaaattagaggtactcttcacatcaacatctttaagatgaggaatttgaaacacagagtgttttcatcttaaaaatgtggttgatattggtaatctttggaaaagctaatgtgtagaaacctcttaatatcaccagtaactattctgtaagtattatctatcattattatacatcatcaaaacatatttggtaattcaaagtggtagaggaaatacctctgtattctggatatcaggagattctgtcccaaatcgttttcactatggtattcaggactgtttgtgaaatattttgattgccaggcacatggtggttttgtacttcaaagcatcttgtggtcacaggagttatgtgactagttttgccctaatatacgagtcactccagggccagaccaattaatttatttctttccctgtataatagtcatgaattagattccagatagcggctattcagttagcttgggtctcagaaagggaatcttgtataaacagagctatcatgtaaccctctgaaatctgggtgttatttcttacctcagcataacctactccatatggttaattcagcaattgactagtttcgtgattatgggaaagaaaaacacattgagtctcagttttgccatctgaaaaataaggaggctggataggaaaaaactatcacgaaagtctctttgagttctaaaattatgtattcactgataagaataaaagtggcagtgaggatactgcggtttgaatgtgtcccttaatgttcatgtgttgcaaacttaatccacaatgcaacagtgttgagaagtgggaacttttagaggtgtttaggtcatgaatggattaatgccattactgagggtgtggtgagtggacccattatcaaggagtgggttcctgataaaaggagaattcagcccccttcctctcctgatctctcggttgctgtctcttgcctttccaccataagataatgcagcaagaacgctctcaccatctgtgacccttcgatcttggacttcccatcttacagaaccatgagccaaataaatttattttctttataaataacctagtctcagacagtttgttatagaagcaaaaaacagactaagaagaggatcagacattttttaaatcaaggaagaacagaaataagctcattaataagctgtgagtcaaagaacaggagagtaaggtgaaaactaaggtcagctgtttcccaaagcatgttcctttgaatctagccacgagatatattttgtgagagaggcttccttgttcatataagtgtgggaaatgctacacatatttctcttaaatgaacttcatgcacattattgttttctgtgtattcactaaagaaaaacctttaaatgcttttcacccagcacacgccaatacaatttattgtggaaatcactcttcaaataacttcacagtgatgaatgggctgagcagctgtaatttttgtttgtgcagtatacttactttcccatgtccttcctcaacatcttttcaggaatttctcctcttcctgcataaggtcacaggagtgaacatatgaaccagagtgtgctattcctctggtcacagtcatctgtgacacaaatatgaacacaaggctccagcaagtataatcatatcccttgccatgattaatatttttgatgatcccctggactagcttagcctcatatatacacaccttagacttctcaggtatgtgagccaaaatttcctttttgctcaaaacttaaattggacttcagtcatttgcttttgaaagaattaagactgaaactattcttccatagagcagatacaggaaaaacatgctccagggtgacaattgagagtaaaatgacacaatttcaaaatgtattaaacagacagcagtctcggctttctcctaaagggaaagtaaatctattagggaacctgaagatgagagagatacaattactatgagaagacatattaaagcttattctttctttttaaagaaaaagattaattggaaataaaagatgatagaaacagattcaaattggtcaaaagacactgaggaataatattattttactgcttgattaattgactcattgatattagaagtattaattaaagcaagtatacagctctatttatggacaacagtgtgctaaaacatgtcaagtattatttcataaaattctcacaagaaagtcatgaagatagataaaaattgcctccattttgcagactggaaaactgagtgtcatagacattaaaaaacttgtccaatgtcacaaactagaatatggtacattctacctatataaggttatggttgaaatgtttcaacaagcaaaagataaaacaattacacacatggatcccaaaacactcattctgtttacttgaaaacatatatatatattcaccattgcagtatatatatatatatatatatatatatatatatatatatatatatatatatatatataaacaattacctagggatacaaatgataaatatgtttgaaaaaatgaaaattagagttagaaactactggtacaaaacaaaaaacttaaaacaagttattttaattttttaatagtaaaaggaatacataaaacgacaaaagtgaaagtttcattggttgtttctcagacaagagaagaaatctgcagctagatttgtaggaaaaagctggaccatatgaggagaaatccaggggttcaattgatacataataaatatagtgacagggtctgaaatatttaggaggtccttaaaagatgaaattgctatagcatctttattcataattgccaaaacttggaagcaatctagatgaccttctgtaggtgagtggataagttgtggtaaatagagacaactgaatattattcagtgctaaaaacagagctgtcaagccatgaaaatacatggtggaatcttacatgcatattactaagtgaaagaagccaatctgaaaaggctacatattgcatgaccccaactctatgacattctggagaaggcaaaacttggagacaggaaaaacaccaatggtttccaggggttaggagcaagaaagagaagaatagacagaacacagagtatttttagtgagtaaaactagtatgataccatagtggtggatacatgtcgttatacttctttcaaaacccccaaaatgtacaaaaccaagagtgaactctgatgtaaactatggactttggtgatgatgatgtgtcaatataggttcaccaattgtaacaaacatgctactgtggtccaggggttgatcacagggagtcgtgcccttgtgggggccggaggtatatgaaaactctttgtacttctcactcaatttttctgtgaacctaaaactgctccaaaaaataaagtctattaaagcaatgaaattgctcaggagggcttgatagtgaaatttctggagctgacagactgaattagggtcctagtgtgtagagacctgacatttaaatgaataagcaatacagaaaattttacttaagatgccaatattggcttggagtatcctaaaaatctagatgtcatttgattgcacattaaattgtattataattacatacaggatcttctgcatttgaacacaatgccatacctttaacaatgatccttttgtttgatatttatgttggcataaatttttaatatgagtgagggaaagaagaaaattgcttgtttttctgaggactgtatatgtttatgtcattgaaatgaaggacaacacttaaatcaagaaaatcaaaaacaatcagattcacaagcagactcaaaacaaaagaaataagggttttaaaaaatccccttagtttacaatggggacaaacaacatgatagcattttagcatctaataatagccattatttatacaagcatatttagactgttatcagagggaaataaatatggctgtagtaacattcaatttggattttccatagggtagacagggttgagggttcccctttattcaaaacataaaagagttagtaaattccttggcagcagggaacaaaaatctcagctgccatttgcctgctggtgactgaaacccattgcctgagtaatttcttatcactgtctgattgacagaccacagtttgatgtattttgaagaactgagggagaccaagggtctgagaaatcaaagatggcttttatgctggttttttaataactctaatttaaagcaattgcatgaactaaaagcttacaaatattttagaaatgacttttaaatgtctctcgataatattctacagttttgaaagtcactacaaaacaacaaacaagacaaatctcattttgactagacagcacttggtttacattatttttcttttgtggtctacattatttaattgcaattaaaacaaaaattataaatgtaagcctaattacaacaatacaaaaaactatacatgaatccttggaacttaaagagataaatttgtctggtcactctttggcctgtagtttttagtttattccctcaggcctgaccagagtatgaaaaagatcacaataatcatttttttaaaaagtcaattcttacgtgcatgctctacctcatttgactaggacaactttactctttccagattcttggaccattcaaattcataggtgtcttctgcctctggaatgacactgtatgcagtatccctttttatttaagcacctcgctggtgcttaccacatcttaccacatcagggacttgtgatgcctctctaaatcttattcatgcttcaaaattcagctgaaggcctacctccttcctacctactccagtccatagtatgcacttttcattctccactctttataccttttggcacaaatcatttggcgctcggcacttcatgaagcacatcgtgtgcctttagcgtgtttctcctgtttctataggcagtctaagaaaaacgctaggtggtaagagcacgcggtgtcactgtccgtggtcctgaaacatggttgcgtgctaagattcttcttaagccaatatccggtgactcctgttcactttttcccaggaatttttaaattggtaaagtggtggggacaagaaaaaagaaagccaaaaagatattgggagagaaagatagaggcatggacagaggtatccctctccagtcattccctagagagaattaaaaatagtaggattttatgtaattttcaaacaattgcagacgcgaacttggaagcaaaaggggggagggaaaaatatcaatggcatagccattgatgaaggagaatttaaaaaatgcatgcactaagtgacataaagccatccaagtgtcggcatgaacacacgcactgatgctagtggactaggataccaaacaggtagcatgttgtgaacttagcgtcggttgtgtcatactaaacttccacagattttctttttgtttctctctcttgatttaaaacaaaacaaaattgtcatttggcactgtggcagaacaaagatgactgtaacttatatttctcatctgatgtagctgtgtacctttttcactgttagcacctctgtaacagttacattccagcaacatcgagtcccagctgccgatggctggcggcgcaaacactccctgccctagctatgtaagttccccaactacagtataacctctcagaggacgaacatttttggatatctcaaaatgcctaagtacagtgtctggtacaaactaggagccaagtaatatccactgaatcaagaaaagaatcacaatgccttccacggagaaaatattcaacaaaggcttgttaaatgagcaaatattccagttgttttaacaattccatcctcttctaggttcttttaaagtccaaatctcccttcctctcccctcgggactccacatcccaacaaacctcccttccgcggcagtcactacctttgcagcactctggccctgccctcctcctgccacgtgtcggacccctgctgggctggccctcctttcctactctgcgacacccctatcccccccgcccctatcctgcccgctcccgcacccggtccctctccccgggcctcgcgactccggcgattcagctccgggtccccgcccgcagggtaacgcggttgtcatggacacggcacctgcgccctacggcggtgccccttcgccgccgtcccctccccccacctgcggcgccgagcctgccgcgcctccagagctccgccctaccccgccccgccctttcgggcgctccccaggccgcgcgcgcccgcggccccccacccagccacccctcgatgcccggtgcctttccaggcgccgcggagccacggggaccgcgggggcgcgcgagcgagcaagcggccgcgcatgcgcactggctgcctcccctagcggcgatccgggccgctgccgctcgcgcttgggcaggacgcggggcgggcggggggaggggggagcggcttcgcttccagccccgagtgaggcggagacccaggcgggcgggcagagcaggcggcaccgcacctcggccagaggcggctgcagcagctgctgcccttgtccctgccgccgcctctccagtcccttctgtgattaccactccagctgctgggaacgggcgagaaagaggaggaggcgagaaactcccaccgacccacagaggtgagtcccgggcagagcatcctccatccctgcctgcctccctccctccccacctccctcccatcctctccatcctcccccctccccgctccccaaccctccctccctcatccttcccaacatccctctctcctctcccctcctttctcccttccagcctttctttcatccctttcttcctctctcccagccccacttccttcccaccctttctttcttccccgtcttccttgcagccactcgccctagagcacagctctgcatccctttcctcttgtctccatctcttcttcccccctttcttacctcttccccggtgggagggtgggagcatcccttgcctgctacaactgtccggattcaggggttccagaaaattgggtgcatatactgagagacacactcttaaacagcgggtgccctgcagattcctaaatttttaggatgaagggtcaagttgggtagagtactgggaactggagggagaagaggatcgaagaagaatctgtggatttgtgctatattagggtgggggtggggagggttgtcacttggacatgctgccaacagcccccatacccctcttcagcagtttctttttttcttctgggaattacatatttccagtgtgtgtctcaccaatttaaaatccagccttccctgctttgattgtctccgtgagaaaccacaacgaaaaaggagaagagaggaaaggaacaagagagaaaaaggggaggggagaggaagggaggtggcagtggaagcttgtgttcttttcccctaggcctctttggtttgacattttcaaaccacccgcctcatatttggcttggaattgaacccgtgtgtccttggtcctgtcactacctacttcaaaggcagaaactctctaaactttaatgcctgtgcaccacagcattatttatggaatgttttgctcagcatacaaaataccaagatagaaaggtttgggaaaatagggagcagaagggtggaagagaggtacttttgttcatcatgggttaacttctcaagtaggataatggttagacagttttggagaaatgaggttatactccacaggcttgtaaatataccatttagatggcattagctgcattagagcctttaacagacacccttacccattttcacccacctcgtaggacccctgaagatgtttaaagagaaacatgctgtgtgattctgtttgtggcttacaccaatggaaaagttgaattagcttcggaaccattgttaataatttaaaattgctgttggttttacatcacttattttcacagaatgctataatttaccttgctctcttcagcttgcattctaaccccttacattatacatgttattggcaatttgacaattctttctgttagcattgctgctgtaaagtttatttttacatggcgggacagccatgcctcagaatgtttagcatatttatcatctcagaagggtccaacagtgtaagtataaatcaaaaatggatattttgaagcctatattttgttctatttatattctcctaaaacaacagaccaaaaaaccttaatatctttagaatagctgtgttttgtgtttaaggagtatgtgtgagggaccaaaattaatggtggattctttgaagttgccagtaagacactatgctgtggaacacattattgatttttttcttttcatttaaattattatatgacagtagtgcaatatgcagttttgcattttatgggagtgtaaagcaggagttgagatgaagagaattgccttcctaagtgattgagtgctgatttgatgaagagctgatagttaatcacctgagtcagtgctggggaagtgtgtaatattaggagtgatggactccttcaactccccatggtaggaatgcaattccattaatggcttggctgactcttcagccatgtaactaaagcttggttgaattaccagtgttaccaacatcctgatgcagattgcagtcaaccctgtgtgtattggaatgcttgcattacttaatagtgaacttgtagataggagtgttttccttgttggtgttcctttccctagaataccgtgaaacaagtgaaagactgtcatgttaattatacatgagcataataagttagttttgtccaaatttctttcaaaagacttttcccctgccagtatgtctgctgttctttgtggggcttcagagttgtgaatgtggggaggtggcagcccctctatgggctttgctctttctttgttgcagtttttctgcagagtggtgtgggtgtatgccccagtttttgatactgtgcttagtatagaaacacaggtacttttcacttgcctcctttgtaaacattagtccactgagtggaaacaaaacataccaagttattaaagaactagcaaacaaagtaacatttttttacagcaaaattttaagagagatgagtacaattaataaaatgtgcattttagaagagcaactagtgtctttgaaaagcagcttgcctccttgactataatccagtttgcagataaagactgacttcctctgaagaatttcatttctagaggcttctgtctttagttgactggacctttaaaaatacttgatacaataaagagccaatagaagatcttatggacccctgtaaaatgtattccggatatattctctgtgtctccctccctcagagctcttaacacctgcctaaccctaggctgagtggtgtgaggcattccaagaaagtagaaagaagtaaaagacactctctttgacctcagcttacagtctagttgaggagaacaggcatttgcatgaggtcctatttcacagtggcaagtaacaagatctttggagacagctttagatgtgagtacaggctctagttcttaggaggatcatgtccttgtgtacaatttaaatctgttttttcatctataaaatgaaaattgtaagggactctgattcatgggcttgctttaaaggttaaatgtgtttagctcagtacttggtacaaacaaaacatgtattaagtaaacattattataattaggagaaatcacttaaacacattccaagaccatatatgattatgtactagaaagacagaagcgcaagtaagtactagaggaattgggaagaagacgggtgtctgtgtagctgggaaaatattatatttggtagtagcactggagcttggacagagactcctgggaatgatttcatgcagggtgggctggaacaaaagcagagagggaggaaaaggcatggtgtgtttgaagaacattagagagactatttactggaagatttggcatacaggtgaatgtattgaaaggtagagtacatacagtcagagtaattatactatcactgggttaagacaacttctagtgtgggatccatttcattacatagaaggttcagctacccatggaggtagtttcagttctttatctcacctaaagccccatcctgagacatggaatccatgatcggtgtcatagtgaggacccagaatattcttaggtcttttcttttaacttcaaggcagagggaaaacttgacctttgctgaacaataaagatttaatattatggttactagaactctccctcatttttccttatcccatgaatattccaggactatatctcgttgtataataactaaaattattgtattttgacctatgtgaagccagtacttgttagggtaattgtatttccaggggcttatttacttttcctaattacaaaagccccttttcattggtgtccgagattattaataaattctaaatggatggtgctctttcagttttgtggctgtgagactaatgtgtgatgaggatagagagtctaggaaggaatttgcatggagcaggttaagtatactctctgtgtggagagacagatgctcactggctacatctgttggcatacctttgtttttagttgaggttcataaactattttgaaaaatttatccataaaatctttatccaacagcataagtgatatgaattgaattcttttattcaaaaatggatttccagaaaattttacccacaagtttgaagtatcagtatttatcatgctcatgtttaacccattttaatagacacaattccattgttttctcccaaatagtaaaatgtttctcatatatttctgttttgtagttcaaataatatacaaaattgtcctcctgaatattatcttaagatatattagtcataaacacaaatatatttctaaaaactaatgtaaatatacttctaaaaactaacagaccatagactgtagtagttttattttttatgttgagatctttcttaattgatgttttaaaaattcagcaaatctaaatcatacattttcagatgtattgctgctagtcagctttatattatactaccagagatttttgacatttttattttccttataagtgaatttttacctcagagctgaattctaactcagccataaatttgcattatatacctctttgaaattattactcataacacattttacaaaacatagtgatagtctaacttcagacaccttaattttctagggctttactattgaacactattttatttttccttttattaataggccttatctgcgtacacaactattagactattacatttcaggtattaggaaaacttgcattaacaggagtgaaaaagcaggtatgttccccatacgtgagggtggtgaccaaacagggaggtggagtaaggatgagacagaatgaattaattgtgttttctcttttgagctgaaggatgtataactatctgttcaattaggggttttctaaatttttgctgcgatgtctactataatctatgttttagttgctttaaagtaagtttatatgtaaatttcaatgaataatttttaaaactagagcatggataaaaaagtaatataaatcatatgttgatttttcagtatgttgctacttgtagacatcgggctattttgtttgctaggcagttttgggggaagccaggtaatacatttatgggatgtattgagatggagatacattaaataagatcctaacttgctacagtgtttctacattaaatgagtggacatgccagagggctagagataaaaaagtccttgagttgtatatggtctcaagggccacagagccataatagaaaattaatagaaagcttctgagatgttcatattctgcaagttgagtttatgttgttcattatgtatctgcagtaggtccaatatcttttttatggccccttgatgttttggaactaaaaccatggactcttgatggagctatgtcagttgttcttccacatcccacccagaaaccacaaggactccagaaatcaccagaggatctgatgttcccatgttttatttgtaagcatttggtgaaaattcagtcttccaagtttatcttaaattcatagggcctgaagcagttgttaaatatcatcaatctatctttcagtgaggaagtagcaatgtcccttaactactttataaagagctaattgtactcaattgtttccgggaaagggtatcctacagtcttttagagtttaccacttcattctgtttcttcaggcgttgataattgccagagtaatttcacaaaatatgttttttttttctaatatgtggaagtggcataaagaagtgtatacaagactcaaatttcctggggaagcccaggcgcagtgtctcatgcctgtaatcccagcactttgggaggctgaggcaggcacatcacctgaggccaggagtttgagaccagcctggctaacatgatgaaaccctgtctctactaaaaatacaaaaattagccaggcatggtgacgggcgactgtaatcccagttacttgagaggctgaggcaggagaatcgcttgaacccaggaggcggaggctgcagtgagccgagatggtgccactgcacttcagcttgggcgacagaacaagactccgtctcaaaaaaaaaaaaaaaaaaagagtcttggggaaaaataaatctgtgtctaaattcatctctctactgcacttatgcctttcatgtattttttttattatattacctagcatgaattcattcaacaggtattttttgaaaatacctgctctgtgctcaatgctctcattgagctagagattataattttataagcacactgaaccaaggcaactggattcccctccaggttttcaaccagctaattaatttgttatgtgattaaataagcctcaaactctccaacacttatttattttatctgccttttgagtgacttagacttatatctagctataaaattctataattctacatgtgtttttttcttaaaatttcaaggcaaatgatttgttttcattgtgttccatttgttttttcttttgaaacataaacttctgctgcataaggaaaaaaaaacttcaccttcagtggcatatgctttccctttcccaataaaattgcaaatttagcttcacagtctctgggcaaactgtgagggactaagtaacctgtcttttcttatctctccatccttccctctctttcattttgaaacttcttcctacattgaaggtacaagtcagttgctaccactatttagggactctcccagtgtgtggttggcttgtttcggccatgccaatgtttgtgaaagactatatggcatttatgcatttagaatgaagtaatgtttatttaagaaattatatatgctttaaggttaatatttctgcctcaggcatagcaaagccttgcttatccccctaaattctatttcagaggacctggtggtcaccagtcttcctaccaatccagctccaaattcccattaaaattattttagtaaaattttgggcatatgttttatacaataaagtgtacccattttaagtgaatactttgttgtggattgacaaacacacctgtgtaaccagcagtgcgatcaagatacagaatatatctgttaccctaaaatcttctcttccgactgatctgctctctgtcactatagattcttttttcctattctagaaattgatataggttgaatcacagaatatgtgctcatttttatattcctttttgcattgagcataatgtttgtgggatcaatctatgattttgagtacataaacttctagaagaaaatataggagataatctgtgatgttggattaggcaaagatcccttaggacccaaaaagcactaatcataaaatttaaaagaaaatatgcattagactttatcaaagttaaagaaagaagttttgctcttcaaaagacaaaaggtttgttagaactacatgtctctctctgtatgtttgacaaaggactttatctagactatgtatagaactcttgcaactcagtaagaagacaggcaatccatctaaaaaatgaacaaaatatgtgctgagatatttcacacaagaaaatatacaaatatctaatgagcacatgataactctataattcaccgaaataattaaatttaaaaccacagtgtgataccactatccaaacactaaaatgactaagttgtaaagactggcaataccaagttttggagaggatgtgaagcaactgtgatactcatacattgctggtgggaatgtaatactttgggaaacagtttggcagtttctcttaatgttaaaaatactcttaccatacgatccagaaactccactcccaggtgaaatgaaaacatatgtacaaggacttttgcatgaaaattaataacagcatactcataatagcttcaaactaaaaacaaccaaaatacctgtcaaattcctatttgaaagttacccctttgagatagaaaacaaagctgctgatatatatatatatatatatatatatatatatatatatatatatatatatatatatatataaattttaaggtgcgctatttaatatatgttacctggcagcagaggaaggggaatacattggaaaagatttctaaaatgacaagaaatgcagaggatgggagacatgggcttaatttctgctttctacatttctcttgtctgtgctcagtctgcatgttgactgcttcctcagccggtgctatgatcacttctttagttcctagcacaccgtcatgcagcagcagcgtctcttcctgcagaatgaggaggtttttgccaaaagccctcctgcagacttctctcttatgtcactggccagcactgaatcacatggacattcccagtctagtcaatggcaaggggaatgggaataccatgaatgataggcgcttagactaaatcaggatttactggctgggactatgtatgggattagccttcactgggtggaggaggttaggggactgatgaacagagtagcaattcttttaatgaggaagaggtaaatgattgttgggtaagtaagcagcagtgtttgttacaatttgatatagaggcctgccttgttctcaggttttggcaagaggttgaagcaaaaagctgagattgtggtcacaactttttattgtgggagagtgtatgcagaaacaggtgacagagggcaacgtggcacaagaaggagaaaatttagattctagcccacagcatgaactggaggggcagggaatctggacccaagggaacaatttaaagtgggcaagcatacaaatagtgacaagcaaagccaagcacattggggcccatggagttgggacaggaagcaaaagtcagtgctggcagtagtctggaatccaggcaggcaaattcgattgcagtttgcccatctgtgaaatcaggacctcaggcaagaagattttcatgttttgcttgttaaggcagaagccaaaacagtaattattttctactttttttcctaaggtgttctcaaccactctagattctgtcttaaggataggagccgcaccttccatttttctagtattctcctgtgtcattgctgggcccacagtaattccttcataaatgcttgttgattcaactaagtctctgaactcgctccatcttcaaacagatcctcagatttctggtcatatgtaacagccatttacaaatgctttcctacaagttatcgaaaccactgttttgaggggcacggtcctggagccatacgtgagtaagacacagtgccttgtctcataagttgacaatctagtaggggctataagatgaatacctgaacagtttaataccagacagaatgatcgagtgtgtcctgcagtgtggtactgatgccacagtggcgtggggcaaaaatccaggctgacacagaatcagcaactttgcttcagcaatggatgggaataagagtatggaggagggggtgaccttgtattagtactttcagattcagtcctgtcttggtctgggaactgggacagggctggcctgccagggagatgagatcaatgagcacagcagtgggagaggtggagaaatcacattcaggagaactaaagctgggacactgataactactcggtaggtagctgaaaagtgagactagagtgaaggggagaggctgggagtagagaaatattttggcattatctatacagaggtatctcaagaatccaataacagaagatacattgtttcaaaaagaacatgttttgtcttttgcacttacagtaataaatgcccattgtagaacatctagaaaataacaagaaaaagagtctggaaaataaaaatcactgcagtccaactattcagtgaacatttggtgaatttctttccccccgtgagtatatctgagttatatagtgagggtgttttcaagtacagctgagatcataggtatatataaatttgtatattatttttaactaaatatatctaagcgtttcctgccataataaaaattcttcctctacattagtttttgtgtaacattgcatttttttggaatttaagtattcaatttttggctgtctacagagataaaatgtctgggttgatctgccttcaatatgggctgtggcatgggcagaagattgattttgggggccccaggagactgcttcaaagaaatagaggtgaaggtttgtgtagctgtgtatatacatatatatttttttcttaaatggtaacatgatgttctatactttattttcattttacatatagtttaaagatatctccacactggctcaaaaacatatacaccattgttttttttaactcttgcctattacttgatagtgtggttgtaccatggtttatttaatccttatttccatgtacattcagtttgtttgtgctattatgctatttcaaacaatgctaagatgaacatccttatacaggtttattgtctacatgtactaatgtattttttaaaggtaaactcataaatgcagttgttgagtcataaggtctgtgaattttaaattgtaatagtgccaaattgctcttccaattgttagtaccttccaccaacaatatgaaagtgcatatttctttacccttttgccaatacgtgataattttaaacttgtaaaagtttaccaatgaataggtaagaagaatacctcttttttagataaatttgtttcccagatttctagaggttatcttttcatttgctttctgtctaatggcctaatgtcttgcctttgctgtgatgagtgtgttcatgttttccaagtttttttgcatgacttagttattttaatttaaggactgaattatattctctgggtataagtaatttgttgttattcctgaattaatgatatactattaaaactactattatgatttctagtaggtgatggtttctttccccaaagtttcatctctatttttacatctttattttcagaagaatatgataatcaggttatcaatttgaaaacaacactgtattttagttagtattatatttaatttaagataattttgagggagaagtgacaactctcaattcataatctttccattggcaggtctctttattcaagtcttttttgtgtccttcagtaacataaatagccttctttatagaaggaaatatttctcattttgtgttattgctatcttgtatgagtttttattaccgttgggaaagggattttattctttaatatttcctaataggttattgctgatgtagaaattattctttttgatttttatatttggttttgtctcctgtcactttgttgaaataccttattggtccaaaaaaacgtgcccttgtgtttttcttagcaatttgtattacctcttttatatgttaagagttcatagtttaaatacacacaaacacacacacacatacacacacacacaccccacttacaagccttatttacatgaaaatgataacatatactttttatttcagtgtcttctaattttaaataattttttgtcttctatcttagatttagtgtgaatgagacactgttcagattggaaatacactgtctatactgtactccagacacacctattttgcttttaaaattattctcaatatctgtcttttccatagtaacgtaagtatatttataccaatatcagtatatttgtgaatctttccatttggagtaagcatagtgtgtacatgaatttcatatgttcacttccagaaatttacttggcacttttatagatgtttctcagtattccatggtgctttttttttttgtatgctattcaaaggcacgggccatgtcttttctatatcttggatagagttgagtgaataatgatctaatggtggtgacaacatgtttgattatgctaatgcctgtgatagtaaactttttttatttatccaagtgactttattgtttggatatctaattttttaaatattttgtcatcatttgcattttgaagctgttgtgctaatacgagaccttcattccacatccatcattgtttgttagaaatgtgtcagtattgatacaatagccagtacagcagcactaagaagattttacagtctccagttcgtacccacatagaattttattttttggcagtaagatcttcttattcaaacctgagaggaagcttaacatgggtagtattttcatgatttttcaaatcacgaaaatggttattttgaatgaaaatctttcactgattatacaaattgagaaaatgggctaattgccttgaattgtaattgttcatctggtctagtctttctgcatacatatcagtattgatttatcattaatgaacccatcatcttaaaaccctgtgagccattctattaggttggtgcaaaagtaattgctgttttctccattaaaggtaatggcaagattgcttttacattacattattacattacattacattattaaaagtaatggcaaaaaccacaattacttttgtaccaacctaataagttagcttaaatagatgatataatttttactgttgaaaacaggcattttgctttgtagaatattgactgtgtatgtgaaattagtaacaagtggtaagtcgtggttcatggaatggcaagagacttttattagtgctgaatcactgaatctagtttaaaaatttggttaactgccttttcttaaagaattataccataaggatgagttaaagtaatactaatatgataagtttcaataaaactctcagttaacaacatatagctattttctgttctagtttgcttgaataatttgaaatgcttctgtctatatgatgaaattttcttgatgactggttgcctttggaaataatttttttgtttgctgtttatgaatagctgacttcttaaatccaggtgtatacgttttattgttgctcattttatcttacagttgcagagctgttcttaaccaaggcaagttaataccatatgaaataaatactcctttttgagtatgaatttaaaatattttttatcaaaattataagtggcattataaaatgtttcaactggtaaaatgctaactttaaatagtttttatttttatactttattgtaattataaaacaatctatactgttactgtttgcgttttactcaagaaaatgcaaatacttagtgaagatactagaggctacaaaatatcatgaaaagaatttgaagaagacctaaaaaatggaaatatatgtatgttcacaaatgggaagacttagtattgttaataaggcaaattgatttagagattcaatgctattgctgtgaaaatcctagcttccttttttttttgcagaaattgctatgctcattctaaaattcatttgtaaaataagaatagtctgaaacaatcttaaaaaaggtgaacaaagttggaagacacacttcttaatttcaaaactaaccgcaaaagtataataatcgagactaaatggtattgacatcagcataggcatttattttactggaatagaattgagcattccgaaataaacccatatatttatggttaattgatttttcaacaagggtgacaagacaatttaatgggggaaagaatagttatttaaacaaatggtgctgagacaactgaataaacatttacatggaaaagatgaatttggaccgctttctcctcccatatacaaaaattaatgatagacttcaatatgcattatagacctaaatatgagagctaactatgaaactcttggaagaaaacataggtgtaaatcttagtgaccttggattaggcattggtttcttgtattaggcagtagatttttagatatgacacccaaagctcaagcaatagaagaaaaataatgtaaatttgactttatcaaaattaaaaacttttatgcatcaaaggacagcatcaggaaagtgaaaagacaacccacagaatgggagaacatatttacaaatcatatcagtaagaatctattcttccaaatttataaagaaccatataaagaatgattacagcttaatagtaaaaagaatacctaaatttaaaaatggacaaaggactagaatagacatttctccaaagaagatatacaaatggcaaataagcacacgaagagatgctcagcatcatcaagtgaatgcacatcaaaaccgcaatgaaatacgagatcacacctgctagacgagttctaataaaagaatattaggccaggcgcggtgcctcacacctgtaattccagcactttgggaggccaaggcggtggatcacaaggtcaggagatcgagaccatcctggccaacatggtgagacccttctctactaaaaatacaaaaaaaaaaaaaaaaaaaaattaaccaggcctggtggttggcacctgtaatctcagctactcaggagactgaggcaggagaatagcttgaacccaggaggcggaggctgcagtgagctgagatggcgccatctgagactttgtctcaaaaaaaaaaaaatttaataaacgttggtgagaaatatggggaaattggaatccttatacatgaaggtagaaatgtcattgtaaatttaagggggaatataaaatgatgccgctaatttggaaaacagtttggtagtttctcaaaaagttaaatataaaatttccttatgacccaacaattctattcttagatgtgtattaaggagctgcaaaaacatatgtccacaccaaactctgtacatttatatccatagcagcattatttatgatagccaaaaagttgaaaaatctgatgtctattaattgaagaatggacacacaaaataaggcatatttatacaatgggataatattccaccataaataggaaaaagtactgatacacgtgaaacgtggatatccttgaagacattgtgtgaagtgaaagaaagccagacacaaaatatcacatattgtttgattgaatttatataaaatgtccagaattcaccaatctatgtagagaaaaactagtggttgtcagggtttgggagaagggaggaatgaagaatgaacgctaatgggtacacgttctctttttcttttcttttcttttttttttggagacacggagacagggtctcactgtgttgcccaggttaagtgcagtggtgcaaccatagcttactgcagctcgaactcctagacacacacgatcctctccctttggtctccacagtagctgggattataggggtatgccaccatgcttggctgattattattattattattattttgtagagaaaggtcttgctgtattgcccagactgagagttttcgttttgagatgatgcaaattctggaattagataatggtgatggttgcatatactgtttgtgcatatactataaaacatccactgaattatacactttaaaatggtaaatattgcttatgaattatgcctataatgtaaggcaaacaaatcaaataattatttgtggttttatttgtttttccatttggaatgtagaaattactccttgtcataatattaaatcatgtattttttcactagagttgaacttaaagccaattcacattgtagagtacaattgtactatgttcatataatcacaaaatgaatatttctttactttgaaaatgacatttaattatgtttatatctagccacaatatagctgaaaagacatttcttaattgcctttcttaggtaaggtagtctatttacgataccaagataagtaagacatggtttctacccttaggacatctaatggtatatagcgggaaagtgcggcccgtaaacaaactgaggaatatgacatggagtagaggtatattggaagttataggtagcagtgatgaaggagtgtttaaagtaaaacagaattagacaaaggtcaagaagattcacatttcaacaggaacttgaagaacatgtaaaactttcctataaagataaattaggaaatagcattccaggttgaggggaaagcatgaaggtaggaatgtcagtgtaaatttaaggctcaacaaatcatacagttgccagagtgcatagaggagggatgaggcatgagaaggtggtagggaaggagacaacaggactgattatacagaagcaagaagacttaggaaccatctgaatgtgagattcaggacaaaggcaaagacaaggctaaccgtgaacgttatcacatgtcttcttgtgcgaaacataattcaggagttagctgatgcttggtgttgatgatgtaaaatatgaagagcttacaggacatccagatgcaagtcttcaatagacatttaggaataagatctggacttctgagctgttggtattcaaattagaaattttagagtgaaacaggaggtgacagttatagctgtggaagtagatgaaatgccctaaggttgcataaagcattttaagtatgggatctgcatctcaggaataccactgcttaagtgacaaataatgagacacatttaatgggaaagaaagagaggaatcgtatgagggtatttacctctgaagtcaagaaagtcagcaaaatgaaaaagaaaacacacttggaaaagaaatatgttactcctacttttagcttttggtttggatttttagccaaagcatacacaagcaaagagaggcagttgtaagatcaaatcttgcatctgtttactgcttccagccatgaggtctctgggttatgacgtcaacaagagaaaggaagggtaagaaatgactcaagcagatgataaaggctgaaccgggacattccttggtggactaggattgtagctcctgggtagctctaaaagtgtagcagttgtgcagcctggtctcaggagccactggagctctgctggtgatgagaagagactgtggaaactggtcagatcagcagctaaacaatgaccccatgtccactttgtggtctgctctgaaggctttctgtggtgggaggttagctttgttttctcttcatcctgatttctgatatttaagccagcagaattttccttccagctgcattctttattttactacacgaatcaattattggcgtgggtaacattttacaaatgaagcttgctaagctaaactgtaactcttgtgggtttagtggtttgtgcaaaatatgttttcagtaaaacaaaaaaaagcagcatttcttgttaacaggatgcctcacttctccagcaaaacaaagatattttactgttactgtccatacaactagcagaaatagtttatcgataaaaaggaaacatatctctttactgagaaaccatttctagttttcacactgcacaatctgaatagtgaagagtggagaaggggaaggcaggtgcctcactggttgattttttttttccttaactccttttaagttgtgaaggaagagtttccaagtttccattgtttccaggcaggaaaggagatcataaaatgttgttgcatagatcagagaggttaaagaatagagaggccgctagaggccactgtatttgttgagtaagaagtggatctcacttgatctttgccagagtagcttcagtcaagtggtcacctcagaaacctgatagtattgaagagtcagtgtgaaacagaaattagatgttgtatgtttccaaagatatttagcagacttggatgctgaaagggaagtgagagggaagcataaagagaaggttcagtttagtgtgctttgttttaagtggagcagtttgagcacagaacactcaggatagtgagttcattggtgaattagtttcctagagtaggtagacagaaatgggtcttagaattttaacactttttaaaactttgtgcttcatctgaataatttatattctttcttactttattgcaaagcccaaattagataaaatttgatggaggggagaaaagaagatgtcagttatgctttgctttatataatagatggactgctaaaatctcactttgtaattataaccactagggaagttatgatttaaagaagttcttttgtaagggaaatgccaccactagtttttatttattagtaaatagatacgctcatatatatatatatatatatatatatatatatatatatatagcttgagggtaagaataaatgacttacataggtttcttagtttattctttcatttctctcatgtgcagcaaatcaatttataagcattaaaatgccagacagtttaagttttaaattcttactttgaataacagtgttgaaaacatagagactttgttctcagacatgaacaatagactttgttgccaaacttcagaaataatcaaatgctatggttttgcatttatatacctactaattaggaaattaaatgatatttccatagcaacggaaacagtctccttgcacacttgttttatgcctgcaataatacacagcagggtgtccaaggactttagcttaaggtccaaaagaggcaaggtgtgtaagcattgacacaaaagatacacacagaggtgttattggatttacaaagatgacatgagtggctaaaattatgttagtaaattttttttttttttttgagacagagtctcactctgttgcccaggctggagtgcaatggcatgatctcggctcactgcaacctccgtctccgaggttcaagtgattctcctgcctctggttcctgagttgctgggattacaggcgcgtgccacaatgcccacctaatttttgtatttttagcagagacggggtttcaccatgttggtcaggctggtctcgaactcctgacctcgtgatctgcccgccttggcctcccaaagttctgggattacaggcatgagccaccgtacccagacattagtaaatatttttaaaaataaatcctccatatgaataatgttaattgagaaggcctaaagagttttcctgaactctgttacagacgctggtttggtaaatgacttctccagtctcaagaattctaccattatattatggtatgcttgaagatgctgaactgaccaatttctgttccactttttttaaaaacagtcaggattaatggataaagtaatgtggctctctcagcccactgggtctcagaaaataaaattatagggatgggctctgtccctagaaagtaattctgtactagtcattaggggagtgacttcatgggatgcttaaataagctttgtgacgactctgacccctgtgaatttaggaggtaaaagagagtattcacttgtcttatttccttctagcctatgttccaaatttatattataattgtgctattttgctatagtactactgtgattgaattacaatttaaagatgagtataggtggattcattgaatgtgctttaatactttaaaaattttcttcctgaatgcattcttctgattaactaattgatttttctttcaccatcattggctattattgacaaatgaactttctaatctctttgtttttctcgctgatgtatttttgaatgacatattttggaacatccaaaaaccgccaagctgctgcttaattctgtactgtcctctcatcacagaatttaatctgctctctcagtctctgtctctgtctttctgtctgtgttcctgagttgtcatttctccaatgctaaaacccctaatctggatgcacctgcacctgattaatttttgaagttctaatcttgctgaaaaagcattcagtgtgtttctctggctacctaattaactgtaagtgccttagcctaccgtaactcacgggtcctgtgttccagactcaagctcatagctcccattccaaaaagacattatcatgctcctctaagggaaccctcttccctgacaagtctgaaatattcctctcccatacccctggctcttcttcagggcaccttggactcattttttgttgtctacctaggagaccttctacatgtcattgaagttcatctaatatgcagtctcgctccttgatgaatttgtatctgatcccttaaaatgcttccatctcattctcctcctaactgctatatccctttatctgttccccatttttgttacaccttttcttagagttattgttgtatttgttgtccaggctccatacccgctacataacctgtactcttgactgagaatgtctttaaagcagggataagctttattcatctaagtataccttacaatgtgtatcacagaatttagcatatggtcagtaaatacaggtattcagtaaacttattcagtttcaatatattaactgttttaaaacatgaagtgaatggtagtttatagaagttttggtatgtttggaaatatcaattttacagtatctaaaagtatattaagacattcttgagacttagaaaaaaacacactgagttcccatgggttgtattttatcaactaactagagtatattaaataatatacaattttgtaattgtgttatagatgatgagagacacaagtggcccctaaactgattgagatcttaataatggcacatgttcctaatggattcagagatctagaggagcacctattgtgggatactagtcctaaggaatgctttatcgatcaggttctgtttataggtaaacttgggaaacgacttgctttttcttctaaaatagtgtctgagagtttctgccattaaacaggcaaacaaatagcccaaagaggaaacaacaaaacacaattaaactacacttaaatatcatatatccatatatcctacattaatttggcacaaaatctctctaccaatctgccctctcctgctcggccttgctggaataacaactggcatcctgcagaatccaccagaggaaatactgatctgagcctttataaagctttttattaactatgtttgctgcacaaataatattataactaaggacatttttcttaaaagagaagtgttatccttcttgtcaaaattgtgatgtatgttgtttgcatttctgtgtttcttttcaggcttgtttatattcattttcaacatggttgtagtcatagaatacatatgattttatgtcattttaaaaagtcatagttcccaattgttatctatatttaataattattattttatggctacattttattacatgtttaaacatttttattatttttggcttttatttgtaaacagtttagaaatgaacaccgttgggcgcattactttctattaaaaactgagcttaaggatcctaagagtatagataccgagttgaaggctctagtgattatggccatattgtttgttataacgctaggataagtttatatagcttcctgcagtacttaattatatccagttccttgtctttcaggctcataataggtattctttttcaatttaattatcttaaaatgaaaacttgtgaacagtttttttttccctgtaagcctcatagagttgaggtaaatgaacgttagtttattataaaaaagatttatagataatttttgctactcttaacccatgatcacctagatacagatatatttattctagtactgatagtatattttctcctgagttcctctttttcatttttgatattgtgcttgttgtccccagtttctgaaatacaacatttttcttgactttgtgataacttcagctgtgttttatatagctttccacttgtgtgattattggcttccctttcaaatatgtcaagttctggataaatattttttcatttctgatttttgctgttaatatttttatagccagttagttggtaagaagggtgaaaaaaaaaaactcctgcaaaacaaatagaaaaaaatacacataactatttaatctgatattgagtagggaaggcctttccaagcataaaaaggaagaaatttaaaagtaaacaactgacagattaagtatgacataatttttaagaaattactttaaaaggcggtgaaataaagagataaactattcatgcaaaaaaatttaacatatgatagacaaaatcttaatctgtttaatagctaatgagctcttatcagtcaataaaaaaccctaaatctttcagaaaaatgaataaactatttttcaatgaacatattttgctcttttttttttgagactgtcgccctggctggagttcagtggtgcaatcttggctcactgcaacctctgcctcctgggttcaagtgattctcctgcctcagcctccggagtagctgggattataggcccctgccaccacgcccagctaattttttgtatttttagtagagacagggtttcaccatgttggccaggctggtctcgaactcctgacctcgtgatccgcctgcctcagcctcccaaagtgctaggattacaggggtgagccactgcacccggcccatattttgcttttataaccaggcaaaataaatttagaaattattataagtagaatgtaaaacttgacatttaaaaaaattatgcccttcaaaatcatttattcttatatttgtccttactatcccattggatatgtaattacataatcatatatataatttaaataaataataatgtatttttaggtatgaatgctatcagaattttagcttccagggacgggtcaaatatgaagggggaggaaaatcaaggtgcttagaaggtattcccagaaagaattaaagataacagcagggagatagttaagatttttgtatcttcaaggctcttgtatagctgcacattgtcagctctgttgaagagttgaaaaaaatgccagcccaattaccatgattagatctgccttgccataaaatatcactaatgtttgtggaatgtttgaatggacacgtacgtgaacagctctcaagctcttttctgattttgacatttataagttaactggatggtacccaaattcttgaagggatgcaacgtagacagataattttcagaggggtcacagcagggaagaagattcggtcaaggtaatgaggcactgattggggtctgctgacagggaagagaagttaccaaaaagtcagagatatacaaagaaagccatacctagattcacattgccagcctcactttcccaagtggctaggttttcttaatttgtcaagagctgagttgtgtaatgaggtgaaagcatgatcgctatttggttgattctgatcatatatctgtttctattaaggtgcaagctgtatggtttgtcaccatccagattggtaggaaaagtataggcacattcaggttaattctccagttggccatcctagctaatagtgtacagcttcataatgaaatggcaagtaagatccagagattcagatactccagataccagtagtacaatcttaaaattgcgaaactgtggcttaaatattttttgactaataatatcataacaaggttttctaaagtttcctaagttagcatatatacacctaaatatctctaaagaagtgtgtgtgtgtgtgtgtgtgtgtgtgtttgtgttgagggtggggtacatgcatgcatttgctttgagctcatcccctactctactgtcgtcactttcaccatggattttttttttcttttcttttcttttcttttctttggagaaggagttttgctctgtcaccaaggctggagtgcagtggtgcgatcttggctcactcactgcaacctctaccccccgggttcaaggagttctcctgcctcagcctcccgagtagctggtgttacaggtgcatgctgccatgcccagctaactttttgtattttagtagagacggggtttcagcgtgttgcccaggctgggctcgaactcctgagctcggacaatccgcccacctccgcctccccatggattttactgtacttacatctgtgtctcttggttttcctgtttgccttttgttcttcactcagggttctcatgttgtttacctcacttgccactgtttgcaaaattgcctgttctctcctcagtgtctctgccctttttatttgcacgtggagggcttaaaccaccccccattgaaggacgttctgttggtgagttgaaaaaatgactgcttaactgactgatttgacctgcctgatccaccagtctgccttgttatgtaatgaccaccatttctagaaattaacaagcccttgaatcaaatgctcatcagcctgtaagcaaatgtttccccctagatttctgctactctgggattttaacatttcttgtctcagaatgctctgctcatgctcagttcctgcactcctatcctttcatgccctttcccgtgctcttgcatcacatttagttcttttatccctttgttcttatgctgctagggtctatgcttggggtgttcatttttctgcattttccagttatggtgagaggtgtcatgtgtatgaccttaggaaaacccaactttaggagaagactggcttccttgcagaacggttaaggtattttccccttaggaaccaaatccgtcttggtaatcagttttcattcttgctcaaattcaggggttcacccagtagcaaaggctgcttgctgcccgcactatgtaaaagtagaatgcagaaaccatcagaaccacttttacctttagaccataaatacttaccatgtcagttatatttgcatcctagaacataattttgtttagcacatgtttcttgaattactatgcctttttttttttttcaagagaaagttatgcatacaactttcctggataccagtagcccctcaggatctgtggttttggacatttgggttttataattttataccccaagttgaaaatctaacatcattttacatatgcatggcttacttcagtttccttcatttagcgaatatgaacattattgattctacttttggaaggaaaaatggtgaccctgttcattccaagagagggaagatctatttaaactccattcactcaatgtagaggagtaagaccaggatcacaaaaacatgttttaaaacactaagatagtttgtaaaaaacaaagataaaacacaaactcaaacttgttgtttcaaactctataacctattaataaatactgtgaacatatcagcttctggaaggattatgctgcagcattagtaataaagatgattattcgaaaaaaaaaccttatcagggtatacttttaaccacaatatatcagaaacaagtgtctttgaaaaaccttataccgcctgtaattttatagactaaagctgttatgatttttttctctaatcctttatttatttattgttgttgttgagaacttgaacatgccagccttgtttattgcaaacgtggtatttagttatctttggaattgttgaggaattactggattgtaatagtgatacaaaatactgtggaagcatggaggacagagagacatgttggatggggtgaatggggaaaatccagagatatggccttgctatcgagcagattttgagagtggaaatagcaggtagggctggaaatagtaacattctatgggaatggagagcatgacccaaagtaggggagctcagagaatattgctgagaggtgagtaggcatgtgtggttcatatttaaattacatggggtcagagtttggtcagaagaaggctgggaacagattttatatggtcttaaatgctattctgagagatttgagctttatttctattccaggggcaagctgtctaattagtgtgctctaatgtctgaagcatgacatgatgactgtgcaaacagaagatcataactgggaaaggtggtggcagataaatcaattaggaggctcttgcagcaagtcaggtgaggccttatgaagacctgaacgagggcagcatacttgagaatggaataacctagagaagtgatctgcttacatcaaaatcaagatcaataaggataaatccaagcttttctttggtatgaaaatatccaaataattgcacagataatggttaagaaaagactagctaggcaggcacaagtacagcagacagagacctgggagtccaagaagaccatatggtgaatgtgagtcagcggtgttgtgctgttattaaaaaacagaaccaacactatggggaaatatattaataggagtgaggcatgcaaatggcaggaagtagcctttctgatctattcataattgttgaaacttttgctttcctcgtgtcttctgttggccttcacacatcaagagcgtgtttagaaagtgtgaaaggcctcgagaaggccattggaaatgctggaggtgatagaaggtgatatctgtggtcctgggtcctctggatataaagtcatgaaggctaaatcactgtaaacctttttgactgtatgaggcccttggaagcagtaatgtgaattctagcagctcaaagaattcagatacaatgttactttcagatacaatgttacttgtaaatcactctgattttatctttatattgtaataaactgtgggtggctttattattaggatagacaggaacagggaggtttggaaatgctacttttacccccagctgggagtgtgtttgccctcagttgttgaatcctgtgatctcatttttcccttctggtcacctcaagcctgtcagtgtttgaaagactcttgtggaccagaactatctgtccttccacttccacatcaataaatgaggctgaccacaactgcatggaaattaggggggctgtgcatttctagctcctgcacttctttacctggttaatgacagtatctttagagctcctcctgcttagtgtctctttttggaaggtctttctgtgactgccccacccaggtcttgtttcttgtcacgtgcattaagaaaacctggcttttaaatagtatttattttaattagcagttacacactaatttgtatataattcctaaattcctttctgtcccaccagactgcaaccttcatgagaacaggaactctgttgcttttgtttgctgatgtttccccagaaccttatatatttttttgtatgaaagaataattaaacttatatcacaaaagggaatgagtaagagaaaaaggatccaaagggggcagttttcggtcattcaaagcagtaccacttagtggttaggggtgtgggctgtgtttaggtacaacacctggctctgccacttactagcttgggcaagtgactgaccctcaccgtaccttagctttctcatctgtaaaatgcatataacaatattacttacctcatagggttacagtaagaatcaatgattggatatttgcagagcaccttaaacagtgtctggcaccgagtaagtgcaacatatgcccttgaaataaatagaagagaagcagagttttgcccctcagctgactccatctccgtttggactatccttcctttaaatctccccacccaaaattatactaatccccattgtattcctgtaatcgtttacattactgtttcctaaagtgtggcatgaatgccacttgctttatgtaggatgactcaattgttttagttgattcacaggacaaacacatttttaagtcatagttatgtatttataatgagcacatgaaatataagtgaaccaaatgtgattcaattttgttaaatattaatgaagtcgcttatacatttaaaaaagatctttgattccgtgactttgctttgtgtagtttttggacaccatttaactcttcagtgatttgtttatttctgagtactttgaagtgttgataacttttcctacttactgtaagtttgatcaaataatttgcttgaaacaacttaacatggtatggagagttggaaatgggtagcttttatttaatagctatcggattggtgtgattaaatgtcaaattttaatgttgtgttgatcaaattgttttgattggtttgcttgtgatttagcatttcataccttgtataaaatgtccatgagacatgtcctgaaaaaacatttctttgttaggttttaagtctgcaatgtaactgtgcttatccctatgtgtcttttgttaacatttttaaccttgaaagtatattcatgtgtataagtataaacatatatattacacatatatatgagtttgtgtgtatatatatatatatgtacacacacacaagaataatttttcaaattcttattttacaaatgttagaatagaatggagctgctttaattttggagctcttatatgtacacacagatatcctatatatatatatatatacacacacacaatgtttacacatatgtataaatacatacatatacttgtatacatatatacacatacacacacgcacacacacatatatatatatatatatatatatatatatacactcatatacttggtaaaaatatgtactaaaggatatatttagctacagagtgaaatatttgccatatagcccaaattcttatggcttaggagttgattaataggttaaatagtggctggtgtctcagcttattagaacatttacgatttgcatttccccaatcttcataatttttttttttttttgagacagagtctctctctgttgccaggctggagtgcagtggcatgatcttggctcactgcaacctccacctcctggggtcaagcaattctcctgcctcagtttcctgagtagctgggactacaggtgtgcgccaccacgcccaactaatttttgtatttgtagtagagacggggtttcaccatgttgtccaggatggtgtcgatctcttgacctcgtgattcacccaccttagcctcccaaagtgttgggattacaggcgtgagccaccgtgcctggccccagtcttcataatttttatggaatgtgtgacatggtgcttgtggtgataatttttcataatgctagaaaactaataatgctttcaactgagagctttctggccttataatttctttttttttctctttagctttttaaaaactaggctttatacttctgcaactgaaatgtgccgaaccttttagcccgaaagtagtatatattgtgtgaatgttctcagcactgctaaacttgccaagataacctgaagggttttgtctggctgctgcaatttcctactgccagtattaatccccatttttcatcccctagtatgggctatttcttcagcccttcaaaatcgaaagaaagaaattttgtattacaaaatgcactatgttatctgatgttaaaagtaaaagatttatcctaaaataactattctatttagtattctttatgagttttgcaaacttaagcagcaaaagttacttttcctttttgaatgtaattgacttttgtatttttgtgatttcaaagcattgaaattaggttgcagacatttaaacagaatgtctcaatttttttgtctgtgttgagctttgaagcaaaattcccagatttgaatctcagcttcattgctcactaaaactgggcaggtttaatgagcattctgagccctaatttacttatctgtaaaatgagatgatagtactaacctataaaggattaaagataatgcacataaagtttatagcgtagtaccttaaacactattagcaaattcttattttacaaatgttagcatagaacagagctgctttaattttggaaatctcacatgcacatacacacacatatttatttattttagtaagaccatttcactatctcctgtaaactggttaaaaactatcaaaaatgaatattttctttatatattaatgtcctgatttttttcactgtagtgcatttctctgcttaatgtgtcactaagaatttttatcaacttatgagaatatggaggggcttagtaagtttaataaatttaatagtttgtttgcattttctaccattttaaaaacaactcatgtgtttttaaaatttcaaattcattttcaaccatttataaatgctctgtttttcttcttgggaagtattttcataaactttagcttacagtgttaagtgaattgtctggaacctggctgttttgtgatgtaaaattgactttcaagtacgacattagatctttgatatatacttttactatttcggaacacgttcataattttccattaaaacatatttgtgaagtttggtaaaatatttgtaaagtttcattgaaacaaaaccgtgtaatatccaaaaaagacaaagcaatcgttatgagctggatatcctataaaagagtgttaggattttattttactttgaaatgtgaaatcaagttattatttcagtaactaagcattgttgtacctttcttcttaagaagattaatatgtaaatttagtgttaccttaattcaaatatttctttaaagatgtttttaaagatagacagctgtagcttgctggttataaaagcagcagttagaaatacatttttgactcacttattattttgactgttttgatggttttcaatctgacaacttttttttagtagctccactgcttccgtcacacccaattggaccttgtttaatgtgttggttttatgcttcactagcaatgaacagatcatttaatagatgattatatatgaaaatatgatttataatgaaaatggtttcataggctatataatagtgcagaactacctggaaataaaacattgtgtccatctgttttacaaagtccattttatgcctttatcatgataccaaaatttcattaacaccaatttgaaaatattaaagaataaaaaaagactttgtgatttaaatttctcgttataaaatattaaagtagaaaaggacaacaagtattcttggacaagggaagagttggacaaaattagtcaacaagatccaggtttggggacttttcttggaaatggagtctcactctgtctgctggagttcagtggtatgatctcgggtcgctgcaaaccctgcctcctgggttcaagagattctcttgcccagcctcctgagtagctgagactacaggcgtgcgccaccacactgggctaatttttgtatttttggtagttacagggtttcaccatattggccaggctggtctcaaactctggacctcaagtgatccacctgccttggccttccaaagtgctgtgattacaggcatgagccaccgcgcccagctggtttgggaaatttttgaatgaatagtgtgtagttgcaataaatcagttgagttgtaggttaagtctagagaagtcagtccataatctcttgagctgaaagacaaaccacaaaatgactattttggcttgggaagccatgaacatggctttcttttcttttcttttgtaagtgaagcaattgaaacaaacttttcttggtaaagggaatgggaagatttctggggtctagaaggtaactataccagttcctagtctaggtgccacttcagaggccttctgtagcatagaagataggtaagacaaatttgtgtaactgataaaggcagtttttgaaaataagctttttatgaaagtgcagggacatagctatattaggttttagtgacttggtgagaatatgtctagcttcagaattttttcttggtgacacaaagaatattgattttttcatgagacccaaaatgaagatgaatcacttcttaaattctaggagttacccaaggaaaatgcttagcaggtatttagagcccaagtggcctaacaaagaaatattgccttggcctcccttgcttgagctctgggtgaacttcccagctcaggtagactgactttggaagaggaagcaagcaactgtcaatcttaaaactccattcaaaggacatctaacttgcagagagagtcccattctgtgcccaattggagcatatgataatggttctgttttgttataacctgagggagcaataggccggggctatccagaaagataagaaaaaggaaaaacacaatatttttcacagttccaaatatctacacaatatttaaattcagcatcacatgatagcaccgttgcagagacagttgtcagcccccttactcactctcacatacttttttagtaatacaactcctgaattggacatagtgcaatacatgtcccagcctcccttacagctacatgtgattattcagaaagttatatccagtgaaggaggagctgagttttgtgtgcaacttctaggccctatgcttagagagaagcggcatgccttcacttctccttccccactccctgtccataggctcagttgagttacagtaagaggacctaggttacaaaatggaagctgtacattgaggatgccacagtaatacaatagatggagcccacatccgtgatatggagcagccacatcaaatatgaactatgtatatgccaactgttacacgagagaaaaaggaactggtttaactccttgatctgttggcttttgttatagcaggtggcctcatatcctaattacatcaaacactttaactataaacacactaaaatgataaaatgatgaaaacacatttgtgtagttgggggatgttgttttctttttttaaaaaaaatattattcaaagtgagtttattgatcttcacaaatgaatccatacacccactaggtgtcagtgatttcccaggttgataactctcgatttaggcaaatcaggagtgaaagtgaagtgactgaaagtgaagtaaaagcttacttttttatgctcataatataagtactcaaacaagcttaaattagataggagcaatacttataatatgaataaatataactagtaattataaagcacttcatatgtgtcaggcactattctaagctctttatatatttactcatttaatacaacaatcatatgaagtaagtactactattatctcagtttagcagagaaggatgtgtgtaagtcaggcacagagaagctaagtaccatacccaagattgcccagctagttggggaagaggtggggtttgaacctgagcagtcaaactctagttgctgttcttaaccatgttttctttaggaagatacaagactaacattagagttagccttgtacagtgagtggtttgtttttttcatgtgagcagagttgctataaatattgccaatactgagtgaggcacatactctcactcagatggcatcttcccctgagtcatccagtgttttttctaggtcctaagttagagaatttagcatccttaaattctcaggaacttttaaaaccatgtcttagagcagaactgtaactccaacctaaaacaggttagaattcatgggaaagttttccagccagttgtatccaagcatccttcagagtagaatagagaaaccatctttttaaaagtatttacaattgtattcaaattattattaccgtagcactgaataagttataaaaatgtaatttccttatagtccctttatctggcaaattgcttctgtttataatctgtagctgctcttttaattctttccaatatgcaaatatattaaaaataggtactaagaataatataaatgtgttgttctttgattgctttacactgccctgctacaaaccaaaatgtggtttatagcagacacatacaacagtttaaaaactaccaactgtccccaggggtggagcaatcaagtaagcaatggcatgttaactcactggaatactgattgattgtacattattgcaacttctgttgcaataactatatacatattttagtcttctcagcaacagttctccctacaatagcatttttatttattttgaagaagttaaggaagctgggttgtatctcaacaacttgcctatgtaatgattcctttccagattcaagccttaaggcctgctcaacagtgcttccaggccaactaattttttagaaatttgtggaatttgtgaaaagaacgcttgatgtacttgtttactaaaatgtaatgtgcatgcatgcgtgtgtgtgtgtttgtgtgtgtgtgagtgcttgtgtttctttaggactagttctctggtacataatagggatcataatagggtttaaaacatttctccataggtagtacagggcttctcaccagaatgactctttgatgcaaaataaatgtattactctttgtgactaattttccatattcagtatattagtgagtgttttctctaatatgcttcatctggtacctaataaatttagatatataaacaaaagctgtcccacaatgattacattttaagaattgctctcccatatgagaaattgtttgatactttatgaagttattcttttggatgaagacttctacattgacaacattcatatgattgctctctttctattttttgacacacaataaggtcagagctctggctgaagaattttccacaatcaagtcattcatatggcttctctccagcagggttttctgatgtgaagaaaatgtgacagcttcaactgaagtattttttagtctttgtattatttcatcctattgtgaattatctgatgcataataacatgagacctctgtatataagacttcctaaattcattatcttcgtagggcctccctcttatgaaagttctgtaatgcataatgaggtgagtgttctgtctgaaagattttccaagttcaggactatcactgagtttgtctctggtatgatttctttcaagtctaatgaaactaccacatggaaaataccaaacacttttccacactgattacatatatacagtttgtctccagtatgagttctctaatatagaaaaaaagtgatagaaccagctaaagactttttcacatgcttatgcattatttacctacttatgatttctcaccagtgtgagttacatgatgttaatgtagtgagaaccgcatttgaagaattttgcatcttcttgatattcatggtgtttgtctttttatttacacccttaggtataccaagggatgtactataagtaagaaacttattgctatcattgtagggtttatctcctgtttgagttctcgcaaattgaatcaggtgaatgttttaacaaaaggttttagtacgtttattactgttactgacatagtttgcctgatgaccactaaactaaattatgttttaaacttttaacatttgaatcatacttaacggaaatactctttaagtactaatgagcatgaaagatacagtgtccccagtatttatcactttcacagactctcctaagcactttgttttgtgtgaatgtttcttatcttaaatgtttcttctcattttcctgataattgtctagtttgttttcacatttccatttttaatgacaaatatgagaaatcattcctttccatttcttccattttaatgtcatagaattgtttatcttcagaaatgctattgttagaaattgatgatttgatttccatgatagtcactgaatctggccagttctccaccagctatgattctttacctttctccatctagagaatcacatctgtttgggaagctgacactcaaaggaaactgggttctcatagtactaatgcatcacttatttgtatatgttctgctgagaagtgaatttggtgaaatctacaaccatatcctagaaggcgatccatgtctgggactggaccattaatgactcagcttctatattcccttctctgatttcttgagtaagtggagagttctgtgaatgcaacactctctgttgggccaggttcagctggcctggcctgccccacagtgcctgctcctctttacctgacttgcatgtatgatgggccagctgctgcagccttctccatgtcactctgttcatcatgtacccaactcccaatcccaggcacttgagctgacccctgtctgatgctgccaacccacatagaaatgtctttcaaataaaaggctgttcattttggtgaaggtccgttgccgcttaatggttatgtgtccacagggcatacggtgcatagtaatacttcagaaactcaggcttatttctgattgtccatccaaaaacaaatttctcagaagtcaggtaaggctgaattctgtctttattatttcaaattctctgttccttcctccgttatatcatttaaaaaagatatagggattggaaacttggtttggccatagactgttttttcaacaaatagaatttaaatgtcttttggtggagctttattattagttcccatggttcctataactttcatgcctcttagcacatgggtcggggcagtattcacacacgtggaatgagcttaatgcaaagcattgcgctttctccttgctcatctggtccaattaacttacagtcatttacatagtatacaaatgtgatgttttgcagaacatccaggatggtttagatcccttcagagttcagtatgacaaaagactagagaattggtttaaccctagtgccagattataagtatatactcttttctttgtcatgtaactatgaactgctacaaaactcttttccagtattttggaaaatgatatgttaatcagctcaatggctaaatacatgaagctatattaatttgtcataataaaaaaaataccacatctgacactgaagctgcagttgggattactacttggttaagtttgtggaagtttactgtcatctgtcaggactcatctgttttttgtagtgccagatggtgtattaattggggatatcatgggaggaccactacccctggtttctttatctgctatttcccctgttatatgatactgtttttgatatactattttgaaagaactaggaggagggcaatatctgagacttatgcttgactttaagatgaaagagccaaaccgagagttctgctatttacaggtatgtttgttttaattatataagggccagtaaaataatcactggctagatccgtggacctagtggacccactatgagccagaactgggctggaactccatttattgcctgactgtcttgcattctccaatctaattagaggtaggaggtgagggagggggcacaataatgtttcagttccctggatatcaatgtcaagtgaaattctgtttctaactattctcaaaatgtctgaatttcccctttctgcactctggttacctttatgatcttcagctgatacccttgggagttctggagacgaaatgattcttcagagttattctttttgaggtaaaagggctagaacttcggacctttaaattgagcagtcactggatgctgtgtttccttgagaagaggccatgactctgggcaaggcacatttctgcagtcaaagacaatttcctgagggagactcagcaatgagccaccagtgcacgtcactcttagcatgtgagggaatcagtatcttggtattgaaaggaggatgtaggcctcacaccacatcatccactccatagccatagccgaattgcaatggcagaatgttatgaaataaaagtaaagaaatattgtagatgagaaggccaaatattaaaatgcccaaatgttacccctgttgtatgaccattacatctgtattaagcgcaacactcatttacttattctttcctttattctttcattcagtatctttttataccaaataccatgcattgcgagcagggtttggattcctagcattgtctgaatctcagctatgttccagtaggactgcatagttcctttagaccttacaacgtgaataaactaagacatagatgagaaacctaatatacccacagtcacctagctgatgaatgggagagttgcagttgggactcagttctgcctccaaggactgctgtgcccttcccactatatctaaagacctttacagggaatattaaccacaggttcatcaccgaagagtggaggaatagaggaataatggaatctgtgataatttgataagtcaataaaaaacatttcaataaataaaaattattactgtaggaagtgagaaaaaatttgcagcttgttcttatagctgtgtctgttttaatattttctactattcgtcactatatagctgctgcaaaccaaagaaaaaaactgaggtgagtctctaccaaatttggaagcttattttgccaaggttgaagatagacccaggaaaaagaaacaaaacctcaggagcatctgtgattatctgtgctttttccaaagaggttttgaggacctcagtatttaaaggggaaagagaaggcaacaggggaaagaggaaatggaaaaatgggggagggtagataaaagaggcaagaggttacattctttttaaggttttgattaatatttactgaatccacattttacttgtgaaaggagggtgctcagggaattacatttttacataagataaagtaaatgcagagtcaagcaagcagtcaaatatacatttgtctcaggtgagagcagaaggataacctctacacctgcgttagtcccaaaactgtggagacaagctgtcaatttacattgtcagagtgaaattcaacagaactctgtttcagggtgtattaagccattctcaaattgctataaagaattacctgtgactgggtaatttataaagaatagaggtttaattgactcacagttccacaagttgtacatgaagtatggctagggaggcttcaaaaagcttacaatcatggtggaaggcaaaggggaagcaggcacatcttacatggacggagaaggaggaagaagggagtgggaggtgctgcacacttttaaacaaccagatcttgtgagaactcactatcatgagaacagcaagggggaagtctgcccccatgatccagtcacctcccaacaggctcttcctccaacattggtgattataatttgacatgaaatttgggcagggacacaaatccaaaccatatcatttcacctctggcccctcccaaatcttatattcttctcacatttcattcccaacattcccccgaagtcttaactcatcccagcattaactcaaagtccacagtccaaagtctcacttgagacaaggcaaatcccttctgcctatgagcctgtaaaatcaaaaccagttagttacttccaagatacaatgtgggtacaggcattggctaaatactcccattccaaaagggaaaaatcagcccaaacaaagggactacaggccccatgcaagtctgaaatccagcaggacaatcattaaacctaaaagctccaaagtaatctcctttgactccgtgtctcacatccagaccacagtgatgcaagggtgggctcccaaggcactgggagcccccttggctgcttccaccggttggcattgagtgtctgcagctattccaggcacatggtgcaagctgtcagtaaatctacaattctggagtctggagcatggtggccctcttctcacagctccactaggcagttccccagtggggactctgtgtaggggctccagccccacatttcctctctgtactgccctagtagaggttctccctgaaggctctgccccatagtagacttctgcctggacatccgggcatttccattcatcctctgaaatctagatagaggctcccaagcctcaactctcacactctgcacaccctgaggcttaacatctcatggaagccaccaaagcttttggcttgcaccctatgaagcaacagcctgagctgctccttggtcccttttagctgaggctggagctggagcaaccacaatgccaggcattattttttgaggctgcgtagagcagtggggcccagggcctgacccacaaaaccatttttccctcctaggcctccaggcctgtaatgggaggggctgccacaaaagtctttgaaattccttcaaggacttttccccattatcttggctatcaacatttggctcctctttacaaatgcaaatttctgcagctggcttgaattccttcttagaaaatgggtttttcttttctaccacatggccaggttgcaaattttccaaacttttacaactctgcttcccttttaaatatgagttccagttcccaatcatttttttgcccttgaatataagctcttgaatattttgctgcttagaaatttcttccccctcataccctaaatcattactttcaagttcaaatttccaaatatgttccttctctccattgagacctcatcagcttggccatctctgtccatatcactatcagtatttttgtcaaaaccattcaacaagtctctaggacgttccaaacttgttcacatcttcctgtcttcttctgagcctgccaaactgttccaacctcttcccgttacctagttccaaagttgcttccacatttgcaagtatctttatagcagtgccccactcctggtatgaattttctgtgttggtctgtttttgcattgctgtaaagaactactggagactgggtaatttataaagaaaaaaggtttaattcattcacagttgcacaggcttaacatgaagcatggctggaggggcctcaagaaacttatagttatggtggaaggcaaaggggaagcaggcacatcttatatggctggagaaggaggaagagatagtgaagtgctatacacttttaaacaaccagatcttgtgagaactcactcactatcatgagaacaacagggggatgtctgccctcttgatccattcacctactaccaggcttctcctcttatcactgaggattacaattcaatatgaggtttgggtggggacacaaatacaaaccataaaatagggtaaatatcttggggctcacaaagaattttcttgtgagcacattgtaagggaggccacctggggaggtatgtggacttctatctttgcagctatctacttaggaacaaaataggaggcagttttgcaactcagttctcaagcttgacttttccatttgacatagtgagtttgggtcccaaggtttttgttttcctttcacactacaaatagatttgggctgttgaagggttacatctgatctgctgtatcattcttgcatgcaatgacctgtgaatgtaaagctttgtctccatttagccaaggtggatggagaattgcttatcactcatgtgctggcccctcttgtagccatcaatacctgatggcacatgaaacctttttttttttaaaacacaaatctgtatttgaaagactcagaatacatgttggaactgatacgatagccttctacatattgaggtaaattactttgcaacattatttgaagaaaatcactcaaggttagtttgtattaattgatcacaatatcttccttaggattgtttgggaaaagaactgtagatggagatcctgaaaattatgagaggacatatgctatatagtattaccatataattttatacactgtactatagagagcacttacattagcttaggggtaattctgaagcttatcttccagtgggactgacacatctaattattaaggtagttttgtcatacccattgccaggccataggatgtttcaaaaagcccaatgattctggatccaatgtctgttagattttcaaggttcctacaggaatacctctagaaaaagtgaaaaatagatcattaagatagaaggctccagacacctcatacccaacatcaaattgtgctagacactctattaaattaatcctgttctcaaaacagttccacagaaatggaggttattgtcattatttcataaatgaggagaatggtgatacttccatggtcatagttttcttatgtttgttttctttctttgtgaatttaccctgtcctatccaagaggcatgaaatagaaaatccaaacagagcaaaatgggtattaagcctattgatagttggtatcaggatattttaaatgccatttagcagccatttaattgcatttgctcattttcaagatgcaaaacaaaagagcccttagaggctaaagcccagtgccacccacctggctaaaagtttattaggaattaggagcagatttcacagtcaagagtctagcactctttttgccttagggcacattcctttgtgggtcctatttttatgcaaattgagatgcaggtgacatccttaggattcctaggtgacaaaaaactgttctatcacttttctctttcttggcaaatttactcttgccttttcaaaagcaaaatgtgaaaattattgaataaggccatacactggaatatagtgtagctgagaaaacacccagtagtccccaccctgagcctttccctcaaaagcatcctcttgaatggggagggaaaggtgagagtgaaactggcatcactttaaggaataagacagttttacttcaaaagctttcattcatgttgtaagtttcaatagttaatatgagtttacatactacgaatttagaagaggcagtcatggatctcatttaagaaatttcctgtgttttaacattttaactgctctattttatttgaattgtgttagaatatattattttattctcaaatgctattaaaacatttcatgcaagaagcagatttatagtgaactgaattctgtatcatgaacagaattctgactagagcattgaatttcttattcttagttatgtgccgtttccatatttcacattaggatttaccaaggtcaatgatataataattactcaaaagatacaagaaatgttcatattgcaaacacatctcagtgttacccactgaccttgactaaagaaaaagttcatacagctccttattcaaagactgagctgagtaagtaaacaaatgtgaaaaatgtaaatattgttgttgacagttttgaggatttaatttctcagtgaaatgtaagaaatttacttgctcagatacctttttggttctataaatgggtccattataatttttgcaaaggtacctttttaaaattattgtcaaaacacattaacttcgagtttcaaagagaattagactatagtccttgtttttattttaattttctgttgccttatttttatgattgagtaatatatcctcctccatataaattgaagattctgctgactcattaatgaaacaagttctagaagttatttttctagtaataatggcttgttaatataataatgatagatttatattgaaccctctttattctctcattctgtcctgtcaccattggcagggtttcatgcatttgttcagtaactgggaagggttaggagtgagcccttagttgaggatcagaggatttcctccatgtaaatttatctggttcatagaagattttatagtggtgacttggacctccctagcagaatgcagcattatgtgtactgaccccagctagcacttttattcttggttcaccatgtatatgaaaagaggaagatgtagctgcctttttcatctagttcaacaaacatgagatgattctgacggtttctagttttttgaattgaagccagtcccctgatacattcttagttacattgttgtgcacaaaatatgtgtgttcaggttttagtgcttaagcatgcctctctgaaatgcagcccataccacacttaggtacttgtcaatataaacacaaaattgttaacaccttttgtcttcttatatgtaaaatagtgccattaaatggaatttagaattagcgaagcctagctgtaaatactgcctcccctaattatttatgtaacctcttcgagtctcagtttttaaatttggagctggtaaagcagtgtttggaaatgttcatttttattgcagacagtcaatataagatttatttgaagtactggttttaaaacataggaaataaatcagcagtacctttttgagtcacttaatttacccatctttttctatctcctgagttaagttaccctacatgcttgcattttttctgattcttaaagatcttcagagaaggaaattctacagcctttttgggcagcctattctagatccttacagcattcactgtcagggaactttttctcatatctaaccaaaatctctgttgctggaatttaagctcatttcttcttttattgtcccctgtgggaagtagaataggtcagttttttgtttattattctctcaatagccctcaatacataaaattaaattatggcagagttatctttatttcataacctacaacttttgcccgttaggagagttcagggcctaaggtggccctcttaattctgatgtatgcatttattttcttgctgtgtattgtgttagttgtacttcatttcagaaattggaaacagaatgtgatgagtgagctctgaatgctggaatttaagctagtatccacaagagacatcttggaggagctagcagagatgcccatttgaaaattaaatgtaattcactttttaggtttccttagttaaaaaaaaaatgacctacacttataatttgcctacttagttttaaactcaatgctgttctaatggtttcatttccattctgttacctaaaatttgaactacttattctctgtgtggaagacttttaggggatgtactaaacccttggaaaattatattaacttctttagatttggctggctttcttctttcaaaatgatgactctgcttatggtggcataatccatatgagctgatgtgactctaaaatccataatgtaattcatttgttttcaccctggattcatatattgagatgaattggcttctctgcagatgtgtctacataggattggcttcctaaactggtattgacatctattatttttgtcagtgtactactgtggtactgaacctaattaaatgaaaactttcagtttagtagaattatctgtttagctgtgcataggattctcctggtgacagttgggcttgatgttgttttgtttttaaatataatgcatatttcacagcattgtacagaatctccagagcgtttacacacatagagatttatacatacgtaaacgttcacaaagagacacttccatgttttagaccagactatgattatcagcatattctagttctgcataaatttttctaaagaaatttagataacattcttagtatgttcaggtagtttcctgggctaataaaagcttagtttaaaactgaacatgcccacaagtgttcttaagtcaacactgaacatgatatctttttacagattgattctgccatttagtgatgcaaaaatgactgcatatctcattattaactataatttaatcagctattattttatatcaataatgccatcttagtaaacttctggtctgataacacgcctaataggtaccaaaattcaggttttacaaaagtattcattatttgtcactctatctgtttatatgcattagtttaaagcttttatgacatacagtagtgctgtaaagattcaatgaaagatccattatgaatccttccctaaagggacgtgcagtgtaatagggaagataacaaatgtaaaatatttattgtatgtggtagaagggcctcagttccttatagagtgcctgatactcagaaaaccaattttctgtttggtcaatcaggattggcttacttgggacatgaaagatgacaaggatttggacacagtgaaatgagatagtatagggaaagtctttctacacccttttaaagtaagtatgagcccaaacctacatgcacaaagactcagcgtttttgtggaaacaatgggagctttttattttcattggagcttgggtaatggtggtgaataagaatgaaacctgacagtggtgccaaactaagaagaaaattaattctaagtgtagatcctttggctagcaggatagaggtattgaataaatgctggtactctctgctcctttctctctcctctctttctctgtctcctcccatcccatcactctttctctcttcccatctttaggttgttaaccactcaaatattttattttatcctcggttttcatacactcagcacctattattgtaggtgcttaaaaaattttgatgaatgaatgctgaataattaaggttgaactttatagatagtggagaggtagagtgtgttttagagcagtaatttgagaagctgaactttctaaagaatatagctggcattaccgggtaaaaagaaacagtggaaagagctcatactggaattagactatcagagggtgctttcctggtatgtgccattgaatttgaaatctggcagtttatgtgaatcacttgggagcttttcagtatggttgagttctaggccttattctttggagtttatgattgggtagatgtggggcggttccaaggatttggattttgattgtgatattttgccatgtctgagaaccactgatgaaagtgagaaataacagaggcccggcttcatttctgtgtggaaatggagggcagggaatgcacttaagaaatattgcagagacatagttgagtaaacttgggaatatattttttccccatagtaggaaagaatgaaagctgaaaccaggctttcaaaccataaaactgtgaagatggtgatatcatcagtgaagtagtggtgtttcttggcacctgacaaagatgatcaaatgcactttggatggacagagagtacgtggaagtaggttgaacactagtagttctatctagcagagaattctacaggagcttggaaaagagggcagaactggagataaagacttcaaagttaattattataaaggaggttataataatagtggtgaagatgataaaataatactaactataacgaaaaaactaccatttatgtgccaggctagtgataataaattcatatgtaacatgtcatatcatttttatagaaactctgaaaaacacccgatttacagaaaaaaaaagttggggctcttagaagttagtttgcctgtgatcaaacagctattatgtatgatatgtatatttaacatctctagcgcctgactcacttctccaagaaagtctttgtgcattagaaacagaacagggaagaaacgtcagctacatttttttttttttgacaatcttagttaaaagagaaaatgacaacttggagcaagtggctttttaaacagtattaaatgcttcagagaagtaaattagtatcaaaacttgggaaaatctactggctttggtcattaggaggtcattaacaaccttggaggttagaattaagtgaaatggagatggaaaaagatgaattacaaggcattagaagtttgttttcagagaccaggagagattgggtgtagcagctctattaggttggtggtggtcatggaaagaataaacaggtggctgtgtttgaatgttcagggtgaaaatgtccatacacttagaatatggaaatagccttggaagaatctggttgttagaccactttaaagtgttattgaagttggctttaattcaggttgctggcttctaagaataggaaaaacaataggagtatgtggcaggtgcagaggttggatagataatgatgtgtctctctattgtatgctatggccattaggaagcaaaagaggatggatattagaaaggcaaaagaatgtcttttcctagaaaaagcagatttcttaagcctctaaatttcagagaaaagagtatgaatatgttaggaaaagcatatgaaataccaaatgatctaaagagctacagaagctgagttgtgaatatatcctggaaacgccttagatcgaagaaaatgttcaccatcagctattgactcaacctcagagattgtccatttatgaagaagcatcccagatttcacctagtattaataattcctgagatttttgttctaaattgtatcattttaataatacttttacattttaattgaaatataattaacataccataaaattcacccttttaaagtgtacaatatagtggtttctagaatatttgcaaggttgtggaactatcaccactatctaattccagaatattttccttacccccaaaagaaaccccatacataatagcaatcattctccaattttctcatctctaggcttactgtctgcacagtgtttccacagatttgcttattgtcgacatgttatgtaaactgaattatataatatatgacctttgtgcctggcttctttcctttagcctcctatttttgaggctcatcaatgttgtagcatttataaatatttcatttcgttttatggctgaataatatgctattttatgcatataccacattttgtttatccattcatcccttgatgggcatttgggtgtttctactttttgtcaatcatgaataatgctactatgagcattagtacacaagttttcttttatgaacatatgttttcatttctcttggtatgtatagtccaccaaggagtggaatcgtttagttgcatggtaacgctaagttcaattttttgagcaacttgccaaattattttctaatactactgcaccatttttctttccctccagcagtatgaagattccagtttctccacatctttgctaattcttgttgtttttttatctttgtgattatagccatggtagtgagtgtgaagtggtatcttcttgtggagataccacatgtctaatgattttagagatgtgcatttttctagtatgactcatgatgttgagcatcttttcatgtacttggtggccctcatatagcttctttggagaaatatctattcagatctttgcccatcttgggctatttgcatttgtctttttattattgagttataatagttttttatatattctggatattagagtcttactagatatatgatttgaaaaaattttcttccattctgtgaaatgtcttttcagttttttgatggtgtgctttgaagcacaaaagtttttaattttgaggaagtcaaatgtatttgtttttattttggtttcttgctcttctggtgtcatatctaagaaatgattgcctaatccaaaagcacacatatttatgcctgtattttcttctgagagttttctagtttttacttctatatttatagatttttgatcaatttttagttaattttcatatatggtaggcatccaactacattcttttgtatgtggatagccaattgtttcaacactatcttcaaagatccattgatagaaatgtaagggttatttggggaatcttaattctattctattaatcaaaatgtctgtgtgtctatccttatatcattattagactgttttgattacagtagctttgtggtaaattttgaaataactcttttattcttaactactataacatttatggttgccattttaaagtttgtgtttttaaaataatgtagttaggtaaatttatttgttcatttatgttcttagttaatcatcttgactgaaaatttacttgatagggttttttagcctctaatttctctgaatggagacagaggaaaagtgcctagctgcctacaatctgtttgaacagaaattgacgactgagattatacaaattctagaaaaaataaaacattacccagcatttcgcatctacaatttgaatattattgctgctaattatactctaaaagttattttaactttaacatttatagaaacacgtgtgtagcatgaaaagaaatgctttgggtatatattgtatttctagccacactcatgcaattatgcaaatgtgaaacttgctctgttgaacagcatgatatcactttactttttattaatttgaaagaatacatctagataaattggagttagatgttaaaaaaagctgagtgttgttgctaaacttgggtgtgtgtgtgtatgtctgtgtgtgtctgtgtgtgacagagataaagagagaaaagaatactaatgaaacttattttctaatatattcctcttttctaagataggaatgtgaatataaaatatgcaaacaatatatgcactgtctaaccaagaaggtgtgtattcatggcattatgatagctaaagtataaacgtagctgacatgatccaatatgtgattcataatgttttacagacaatattttgttaggcatttggaaaaaggaaaacacctaataataaagatgtgtatatatatatatatatatatatatattttccttcattctctcagtactattttctatttgatgtgcatatgatacatttataaatgcatatacttacataaaaaagtatttatataatttatgatgggattcagggttttttggtccagatagacatccaccaagctctaggtaataacataacctttgtctccttaggacaaaaagtgacttttcaaaaacaaaagttgtgttttatacatgataatcaggacaatacactatagttagttgtttctctttcaggttcactgtatagggaaaggcatattaacactacttagattgcgtccctttctctcaacatcattgcttgtctctaatgggctgccatctccagtccacatgtaggagtttgggtggggcaggttccatatttggtcaaaacaatcttattttactcatgtggaacatagacatataaaattttatgctaattatgcaaatattattttcatgtataatttatgaatgttttgaaaatcctctgtaaagtgtggaaaatgttttgaattgcatactgttctttaagctaactcataattatgttatgtggaacttaccaagtatactagtgcagcatgtatttagttttcattaatttggaaaaaacatactttgctacattgtacatttgtcattcaaagtcattataacaaatgccattaaaggctagattgcctggtatgttaatggtcccaggttacattgtttgttggcatagggcctggtcattgctcttttccatcctcataatggagaccatctccaggatgcattactggagcctggtctgacctgagggcaccaatggagatggagatggcacaagaagcattccttttccaccatcccagtttggctgtgccacacgtgggtttgcgtatcacctactttcagcattaccaaaataggaatgcagctgccttcgttacagggaggtgataaaaaccgcatgctgagctgatattgtaaagaacatcctattaaatttcattgtattgtttttgttatatacttttaaagatttttaaaatatattattttaaaaattaatattttaaatttaaaatttaaattaatattattttttaaagtatattatatatttttgaaataaatgtcaatgggaaactcaggtcctaactctgtgctatttaatattccatgatataactgcgtattagtggaacgctgtctctaaaaggtgaactaataatagtcactgcttattgatatatttttacagaggttccttaggagacagaatattttaagctggtagtggtgaagatgattgaattttctttttaaatggagggggcttacgcattcttagcttattttagaaatcctactctggggatcatgcacatttgcattgaattccatggcataaaaaggaagttaattcacaccttttcacactagtctagtttataacacctttgtagcacacattaaaattttttaaattggtgaactcacatttttttctcaagtgtgcctgaatttggtttattatgtgtggcaaagagtagaaagaatatatgtcatactttgctttttctgaagttatgccgtatcctgaagttatatttttcttcttcttctttcgctctgggattccagcttcatgctagtgctattaagagctattagcatataggtccttcagtcctttcatatatttatttcagttattttaattaagcactgttttatttacttgcgttctgtttattttctgcctctctcagtgaaatagtaaactccataagggtatggacttgcagtaatcataaaggatataacagaacatattaaaatgtaaatatttttgggcagttggggagagcaaggatttaagtgagggaatgacttgattggatttacattttaattttggaaatgatcttgatggtctggtggtggtggtgttgtaggactttctccttagctaaaagccgggttgtcacacgatcatgaaatatttggcttgcagaccctttgaagggtgagaaaaattgaatttattgggtgaaaaggaaaaaaaaaaaggaaacagggactctcagcaaagcgagagtcctcctagctggtttcccacctcaggttgaatctcaggtactatccaggaagaggaggggccagactcctccccactgcaaatggacgaacttcctgaggccccaccccagtgcacactcctctctcagtgtgcggtccagtcagaagttctccagggacccctttatacttggctgtctcagtgagagcatgtctgggcaggaagaagacttagaaagttgatgcagtaagagatgatggcctgatttaggatattggtggtaggctggaaactcgcagaagtatttaagcaattattcaggaggtagatagaacctttgaggcttggtgcttcactcatgctagtggtaagtgaaaagaagagtcaaggttattctcaggctttgtgcaattgttgaagtcatacaggaggagaaatggttattttgtatagtaaacaagtaactcagttacaaatttgtttcatgtgaggttcttgaaagctttcaagaagaaacatacaggaggttgttggagataggaatttagagctcagtggagagatctctgcgtgtttaggtttattgatgcataaatggttattgagaccatagtaaaagagattttccaggaaaaatatagacagaataggggattaagactagagccctgaggatctttaacatacatagaataagcagatgaaacagcccgaaaagacaaaatgaaggagtagccacaaagatatgcagtgaaccaggtgagtggggtgccctgagaatgtatccagaagtctgtgggcaatggtgccagataatacagaagaagcaagcaggagaagaactaaaagatacctattaaatattaattgaaacaacatttgtctagggtctattatgtgaatgtggtcttcaaacagttccataatgccagctaccagctttcaaagtatttcatgaaaaagttaccaccattaattcctgataacctaatccagattgtgccttctgaccttttccaactttgaaagtttgaagccacaaagaaagacctttcccatgttgcaggagcaaaataaataaaggaagcttttctttatttagatccaaatgcatgatttataaaaaacactctttgttatgaaaaatgatttcattaagagaaaaatggaaatttttttaatgttgccaaacaaagtggctctccactattattttcagggaagtcaaatctattgcatattgaaattgtatattgatatgcagatacccaaaagatgaaatgctgacacactcagctggtttctttcattttactttcttgttgttggctctgcacctagggaggcagtcatatgagataattatgattatttgagtgaaagaaaatacaatactttttataaaatgatgaaaaaatgtaactggaaaaactctaggaaaaaatgaaagtccaattataatattattttcttatctttttttgggtactcagtttcaatttatatgtgcccggtgtgataatatgaaataccttttgagttatactctcttttgaaattgaatcctactttaacttcttgttgctagaattccttctatatttacaactctcattaacagtatatgttaaaacagatatggcatctttatgatttaatcaatgaaactcatgataaaatatcaaatgttcaacgttgacaagaacgtaaatgaaaacaagatactagacccaacaaatacacatttgggtaaacatatagagaaagcataacacattcaataaagtagatactttaacaactgccactgaggaagtaaatgattctcttggtagaagagaaaattaagttggaagaaggaaatgtatttgacttaaataccttaacaaggaactcaacgagctttgtgattgcatgagggcaatttaatgaagtcctgtggttcctttgctgttgttgttgaagttgttgtcatttgtaatgtgatctctttgcctaatggattttatctcttcttttcttcaaaagatggaattttccttgatttttaaaataaatcttaaactggcacttttagctatttgtaatgtattttatctatttctacatttactagatatgagacttaatatgactaatgctgagtagtctctttgacttcacctgagtaagcctttgagattcacattttatgccattgctccaacaggaagacccttctacctagactacccttcccttatttttctttcatatttctgcccaaatatgtaagggccaactcaactgttgttgttcttgtatagccttcacctctcatcccagtcaaaatgagtttcaccttcctctttattctggtttgatgacccttcctccccatacaagtagaagcagcaatgttagatgagttccctggagttgcagcctgagattgggtgggcattgcttgtgttgagaccacagaaggtagagccaagggatgtattccacaatacagcatagtgggaaagagccaaactcggataatgaatcatcaacttgaatggttaaaatttcagggaccatccaaactggaggctctaatcaggaaaaaatggtttgaaattgagggagaaagttggtacctgaagacaaattactgagccagagaagactggactatttttagagaatgcctgcagacttggcagggcagaaggtagacattgaagaccttgaccacaggaggacaccgaatctttgtttaattcatcatgtaacacttattacagtatttcaccatggattgtaggttggtaaatttttttctcacctggtatattgccaatgtctccaaagtcatgttttcagtgttctctcctttgtatctattccccaagcagtataatgtctggcacatcgtaagtgctaaataaatattatttcagagttattcttattatgtaaatttatagctaactctcattctgaactgtactttcctgtacatgcccccagtgaagtttagtcataatttcccattttttcaatttataaaagtaccttcagcctgggcatggtggctcacacctgtaatcccagcactttgggaggcccaggtgggcagatcaccagaggtcaggagttcaagaccagcctggccaacatggtgaaaccccgtctctactaaaaatgcaaaaaattagccagtagtggtggcacgtgcctgtagtcccagctactcaagaggctgaggtgggaaattgaacctgggaagcagaggttgcagtgagccaagattgcgccactgcactccacctgggtgacagagtgagactccctctcaaaaaaagaaaagtaacgaaaagaaaaggaaagaaaagaaaagaaccttcaggtttataattaaagaattcatgatgaaataaaaaacaatatttcattattgagtaaatattgaacccattttgtatttaaatatcacatagggccaggcacggtggctcacacctgtaatcccagcactttgggaggctgaggtgggtggatcacctgagctcaggagttcgagaccagcctgggcaacatggcaacattctgtttctacaaaaaaaaaaaaaaaaaaaaaaaaaaaaagccaggcatgatggtatgtgctcatagtcctagccactgaggaggctgatacgggaggattgcttcagcccaggaagtaaaggttgcagtgaggtgagatcatacccctgcactacagccttggttacagagcaagaccccgtctcaaaaaaataaaaatgacataatattaacgtttctatttttatatgaagaagtctatttaatcattcattgatttattttttcaaatcacttcttactgtgtcttgagaattttacagaaaacactattattgcttctttcaccagccagaagagaaagcatgattgtgttaggtagcgtgacaggtgaatgcacagtgaatgacaggagtccttgtgggagtagctgttctctcagggagaggttaaggagtccattttagctaagtagatgaatgaacagggtcggctggggggtcttgaggtatgaatgcatacggctataagggaaatggttcagtagctgaatgtcctgaggactgagaaacgatggaagatagtaaatgcagagaggggacaggtcatgaaaacatgccatactaaacagtttgagttttattctttgccttgagaagcactgaaggatatatgaagggattcaggtacctttcttgtattctttgctgctttaccttctacttaatttttgatttccaactcacaggtgctagtaggatctgtcaggtcttaccacagcagcaatgtaggacttgataccagcgccaaaaatgtaactaccaaagtcacttaagtgtggtatttgcactggaaactctatttccccatttaataactcctttggcatatttgaattcagtgtcagatttaaaacatatgtaggctcaggctttacttttttaagtaagttaaatataaaatattacaaatactttttatgccaaatctctttggaaattgaatgtactgatatttattgtggagatacctcagccatacattctaaaagctaaactaacatagctaaactaaaatgtgactgtggtctattatgactaatttatttgcaattgtgtcctcctgaatgcagtaaatagaaatcattatgaacagtcctcatagtacaacagcattaccttataatatttagagaatttattctatatcttgactccttaatgtcttaaaccagaacttcaatgtggtgaataaatttgtatccacatgcatcaattatattgcaattacggtagatggatttctcagtaaccctaaagagatggatttctaagttacccactgtaatatattatttcttgaaaagctttcaggaatataacttcatcactgtctccagtggaccaggtcagtgttttattcctcttgcagccagttttctctctgataatatagctagtttctcttatgtatcttttgggaaagctcttaaaatcacagtctcaggtgtttagcaggtgcctagaaatgatttttttctttaaacatttctgggatatatgatgaaatattcttgatggaccctttgtaaatgtggaaaagaatttcttccaaatgattgttgtttacaaattgttgtcatccaatttagataagggaattaagaatctgtacatgaaatttgccgattgtaacctatcagcataggagattatgacagtacttgtatatcacactaggaataattgacactaggtttagaattcagaacacttttataaagaggaaaaaagatgagaaactcattttattgggggtattcagaaaactatactttagaataacatttagctataaatttacaaaatgaggatagcccactatgtgtttactaaattaaaaaaagaaaacagattcagagatcattgcagaggaaaatagagcatgaattagtcagctcttttctatggcatgaaatatgtagattaaatgtcatacagagttacaaatacaatgaaataatatactcctgccctcaggagaccacagcagagaaaatgtaaatatgaaacatccaaactccaaagtatgtatattgtttacattcatatgccaaagtgatgtgcctgctattgagttctgtgcctgtgtggcttcttgaaaagaccaaatgtttgcaatattttatatctgcagtgataacaacccaatttgttttcttctgaactatctcttttatgaatagcctagaaaaatgtggttcactaaatcattagaagcactgattctggaggattatgcatcatagtatgctacttggttttttggcttaaattatttcaacatggtaaaaggaaatgggcctgttttccatttctcatttggaatggtcagtaacaagtgtcttaccttggaaattgtatctatcattcttgtagtcacccacacttttgtacttggctccccaccatcccaaccatctgttacaatgaattataatttcagaacaggaaagggactatagttaattgtcttctgagatatgaatcccctttaaatgatccctgatagatacccagagtgtgctgtcaatacctggaatgacagggagcatcctaagtcctttcaaatcttgcttcctgctattttctttgttcctttctttttgtcttttcagcttttaaactgatattgataattatcatgcctggatgtctgcatatagcttcctaactgatctttcttctccatttttttcccctggaatatcttgacaccacactttaactaaaattccaaaaacactttggtcatattcctaccttaatcagaaaccttcaataattccccatagcctgcaggatacagtcagaactcattaacttgagttaatctggtcccaacatgtttaacttcacctttcagcttcctcagccatttacttggccttagttgatctactcacttttattgaaattatattgttttttcttgttcaatgcttttggagatgctatttcccttacctttccctctttcactatgaccaccttcttattttagtactgtctatacttgaagaccctagtcagtccttctttttggtagctgcctgcagaacactgcccatactgtgatgtctttgttttctgaactcccagcgtgcccattttcggcctcattgatttggtgcttaattatgagctgaattgtgacagtttttgtattgttttattgaactttagtttatcttttgtattgacgtttaatttttcacactttttaacttggctgtcttccagtaattttatgagatggcatgataaagcagatggttttcaagtagtattcaaccaaccttgagcgatttctgtacgtcttgctggggaagggaaagggagtggactgagacttgtggtctccaccagcttcaagcagaacatctctgctttgattttcgttttatactgaacttctgtatttgattatttttgagaaaaataagttaagctgaaaatgtttgaaaactatagatgtggaggagaagaacctggacttggaataaaggtacttgggttttatttctggctctgctccttgctgccctgggctttagtttcctcatttaaaaaaaattataagccaggtgcagtggctcactcctgtaatcccaacactctctgggaggccgaggcgggcagatcacttgaggtcaggagtttgagaccagcctggcaaacatggcaaaatcctgtctctactaaaaatacaaaaattagccatgcgtggtggcccacgcctgtagtcccagctattcaggagcctgaggcactagaatcacttgaacctaagaggtggaggttgcagtgaaccaagatcacgctgctgcattccagcgtgggtgacacactaagactttgtttaaaaaaacaaaaaattataaggccagtgtatatgatcttacattccttttattgtaaaagtctgtgatgatcagaaaattagctttattaaaatagagtgacatttattcttaattttaaatttcttttttctgagaagggtatgtttacataggaagttctgttaccaagtggtttgcagtttttagttgctgccacggccagaatgtttcacatatggcacattaattatatgataattaaatatgaaaaattcaaattacatttcacttttgtcttgatcaaaacactctatacggcatttccttgccttttgttcctccataccgcttatgaactcttcattagcgtcagactggaaatctttatctattttttaaaacaagaagaattttaaaacaaaattactgttggatgttcaagtaataaaaaccgtgaaggctgaatctgtgtaaagcaagagaatgctattccttacaacgaactttttttgtcaatatccttttcaaagtaggaagtctccataacgataggcaacaagtgtcatcgccaatgctgacaacacatatcttactggtaagttttatttgttcctagcctcatacccaaatgcaattaaagatatctcctgtattgtcactgcaggagaattttatttgaaaagtggactaacttaaagcctgaaatatacctagtctgaagtctgtaagttacaatttgactcaaacagaagccatagtgaaacagatgaacacctgaaattcagcagacattagcagcatgctgctattcagcaggtttcagctgcaaaccaaattctactgatgagggactcacatttccaataaattaaacatagaaccacgatttttaaaattcctgttttacacttttattttagaaaactaaacagaaaacctttaacaacacaagaaaataataataaatattttgtgtataactatataagctgcttcagattatcttaaataatagtatcttcatttcatggaaattaatgggggtgttttcatgttgatagcacttgtgaattggtggtataaggcctactcctctaggtcctggcatttattacagaaataacctaccagaaatttttggatgtcttaagagcagtgtggattctttccaaattccaagaaatagtctttattgatcaacacttgcacattcctctcaagcaagattgtcttgttcaggaagggaattatggagacattgctgaaaacccggtcattgaaaattgttttaaaaatgttcagagattctgtaaagtgattcagtcagtcagtcttctgtaagcatctggtcacattcactagcagagacaaggaaaagtattgatgtctcactgtggaagcaaaacattcaatccaatgtttcctttctgatctttgatcagctacatcaaacattttgaaaggaacattttctttttcttttcttcttttaacatttattttaggttcagggatacatgtgcaggtttgtcctataagtaaattacgtgtcatgggggtttggtgtacagattatttcatcacccgtaataagcatagtactcaaaaggtagtttttcagtcctcaccccccttccaccctccaccctcaagtaggctcctgtatctgttgttcttttctttgtgtccatgtgtattcaatgtttaactaccacttttaagtgagaacatgtggtatttggttttctgttcctgtgtttgctcgcttagggtaatgacctccagctcaatccatgctgctgcagaggacatgatctccttcatttttatggctgtgtagtattacgtggtacgtatgtaccacaatttctttatccagtctgtcattggtgggcatttagtttgattccatgtctgtgctttcatgagtagggctgcagtgaacatacatgtgaatgtatctttatggtagaatgatttgtatccctttaggtgtatatccaaaatgagattgctgggtgaaatggttattctgttttaagttatttgagaagttgctacactgctttccaaaatggctaagctaatttacattcccaccagctgtgtataagtgttcccttttctttctaatctcaccatcatttattttctgactttgtaataatagccattctgactagtgtgagatggtatcttgctgtagttctgatttgcagtttttgaatgattagtgatgttgagaattttttcatatgcttgttggtttcgtgtatgtcttcttttgaaaagcgttggttcgtgtcctttgcccactttttggtgaagtcatttgttttttgcttgtttatttctttaagtttgaaagaaacatgttcagtttcaatgttgtacatgaatgctgttggtgggcttctggcaagcagaatcctatgatggaatgtaatctggttctcgaagtttatccattatcactaaatatttttacatgttcacccagttgaaatatccacactggttatagggattcctcatgcctgtgtctgcccataacattctcatagcagaaagatgttataaacaaaataaaacaaccttgaggttccaccatttcctggttccctgtgcctccttgggtgacaggatgtcaaatgccatcgtgttgtctccactgagttggtttgaatgccctcctcaaggaatatgaaacttccttttttctctactggcatcctcatacttttgatctcgttgctatagagagtggggtgaaattcgtcatgtgtgcacaggtcaaaatcctgccagtggattatccacagtggcttcaggaaggtggaattgctgctgtctctatgcccatagcaggatcttcacaggctgcttgatgtaggcctgtcttttcccaggacagacacttgtccatcaccttggacttgctgctgcacatcgcaatactcatcacaatgcagctaagtgcatgcaaagtgtagacagaaaaagcaggaagccctgataatttattttttattccaaacaatattaaccaatggaaagagcctgcttggattgaagtacaagagtatctgttgtagagaaattgatctggacttaaatgctggctctacaaatgaagaagcctggccaagttactaaaccttattgaacctcaatttccttatctgcaaaagacagataatcttaactatctctcaggactgctgtgaacaccaaatgagaatattagtctaaagcggttagcccagtgactggctcttaggtatctggactatttcaccaccttttgttccctgtaattattcatttcctttttttggacttacttatgaatgactttggacttttttcaaaaatcagacacttaaaagatgaagtttgtcaccattcaggctccaaaaacatttctaaatgatatccaaaatttagtggtggcaatttcaatggaatagattccaaataaatacatatttagatgtctagctgtgtttgctctgttagaaatcaatcgaatttacctgagagaagggagaagaattttacaaaaagagttaaaggagagtttatgggaatgaaaatttcaccttttttgatgtcttgttttgagtggtaattgtatcagtgtatatagctttcaaaactcaatgaactaaatatctattctttttaattttatcttacctgtagctcggttttttaaagtacccatgttgcttaaaatattattcaaaaaagttatagtctctatttcactttgattctgtaaggacttcataacaagagtctcatcgatttgttagttgaggctcatatatttaagtgctgcttgtaagactaggtattagtatgccaaattaaatttatggggcgtgtggggtgtgtatgcttcttgttagacgatatcactcatttttagtgtttgcttttctctcatgctagaacctgtaacttcactctacattggccccattgtgaaatacttagaacaattgtttcttgagtttaaataaaaagtcttatgcatttacaatgtattttaaaataaattatcgtttttcatccataagtgaagaaggtcagggattgttctctgccaaggaatgactttactatggatcatttgagaaagaaaggcctactaaaaactattcgagcataacatccagtttaacataaacacgttttacttaagttagtgaaaatgtgaggatagaagtttgcagccatgttcttcatgggggttttatgttttaagttttctttaagcttgtaacagttcattattttctctttgatctatctagcagttgaatcaaagttagttaaaattttcatgtgagaaccatagttcacttgcttaattcatgtgttttagatagtattaagatactgtgttcatctgaaagttcttataactggactctaagaaatatatattcctggtatgattgttgtttactacccccaagtagtttcaaaatgtttaatgccttcttcattctgtgaataaatgacgtatgttaacttttattctatttatttttccagataagcatttttaatattatattagttacatcaaaatatatttagaaattaaacaatgtaagtttagtcaagtttcatgagataatgatttatatcgaagacatggttttcattttgaaatgttattttgggtcactttacaatgatatgacaagttacaagcaaataagtgatgtctaccttttgatgcttgaaggaggctattacaaattatttcaggcttcaaaaattgcacaaaaataataaagtaaatggtataatatttttattgttgggagaattacccctatccattctaaatttttttttgtagatagtctaagtattatcttaaaatgttaattactttggtgctttaaaataacagtgactttttcctcccatgattttgaaaccttattaggtcaggtgtataaaagtaagtgacattttaaggtgttgccaactcaatagtgctgtctctttgcatgtgtttgtgaaaccgtttccttcttgaaatcccttgcaagtgaatacatttactgttctaaaaatgagaaaatctgagtctaattcattccctatgtttaggaagaagttgattatgtgtccttttaatccaatacctttactgaaaataataactttttataaattcatttgataactgaaaagtattcaaacagattatttaaacaaagctcatacgtgtgaatgttggttgtcactgccttcaataaggaataatcactgaggtgcaaaaattaccgattcttatgtggaatagtgggcacagacagcccaacatttgaatgaaaattgtaaatgaacgaaagctattataacacttcatagcaacatctaactggctctgtaactagaagtacatatttgattacttattttgctctgtaaatgtcctgtttagatatttggtgtgttttttttcctattagttaataggtctttttttaatatgtagaatttcattatattttcaagataatatccctttgtatgttatataaggttcgaatatttcctcccagagaataacctgccatttattctttaacggtatattcagacactaatactttcaagatagtgaattaataattattttaacttaccttttgtgggtttctttttcaggcaaaggctgtcttgtttaggaatagtttataatcttaaagaaaggaaactattctatattctcctcaaagtttaaatttttcattacatgtaagtctatgatttatttagaatatatttttttctgtatgggtgaagtagggatctgattattttttattgtttgggtaaccagttgtctcagtagcatttgaagactattttctcccagttcatttgccctgcactctctgccttacattggctttctatatagcacaggcctgttcctggactctctattctgtttccggggcctgtttgacagtctccaagtcactaaagtttgtcttaactaaagtttgctatagctttatatttaaccttaatattcagctgggtatgttttgaatattatctccttccttccctgtagtctttttgtgtcttaaatgtggggcctctaaatagtatatatctgttcatttaaaaaccatcctggcattctctgccttataactattattttagtctacttacatcatgttgtttggtattcctgtcatatttgacattactactaataacttaggttgttcatccttcattcctcccttccttcctcctttcttccttccttttttctcttttctttccttttcttcctcctctttctttccttcctccctttattccttttttccttttttctttccttgtctttccttccttcctttccttctcttttttctttttcttaatttccttccttccttcctttcttccttccttcctccttccctccctccctctatcccttcccttcccttccttccctccctccctcgcttccttccttccttccttccttcccctgctacttattttcttcctagaattctaatcattttttttatctgctacctggatcccccctgtggccctagaatgaggttcaccactttttcaaggttttatgaaggatttaattctgtgtttaaaggggcttacaggtagaattagacacctgaacttctctatcggtgggacagtttaatataatctttcctcaccctccctttgtcattcaaattaaatattttaacattaagcttttaaaatataaatgtatttgcttggggtgcaggacagtatgatctaacctccaaatctttggttgctcttaagcacaagtaaaggacattttttattttattttttcgagatggagttcactcttgttgcccaggctggagtgccatggcacgatcttggctcactgcaacctcctcctcctgggttcaagcgattctcctgcctcagcctcccgaatagctgggattacaggcatgtaccaccacgcctggctaattttgtatttttagtagagacggggtttctccatgttggtcaggctggtcttaaactcctgacctcaggggatccacctgcctcggccttccaaagtgccgggattacaggtgtgagccaccgcacctggcctcaagtgaaggacatttcttctgaacaaagttgccacaagctcggagaccatctgacactgaaaaaggaaaatttaatggcaaatgctcttctcttggatgttaccacagacctcttcactgtttcaggaaatgcaagtagggtctgagctggtcctatggtcaagaggtgtccattgtagcaaccccatctcttgattagatattggaatgcagtgttttttaggatctatttcttgatctcaacgttggagaaactttctccagatgggagattgtcctgtattatctgggtgggcccaatctaatcatgaatcctgacaagcagagaacctttccttattgtggtcagagggcgaggtaattacagaagaaggatcacaaagatctgatgtgaaaagtacttcacccactgctattggctttgagttggaaaagggctgtgcgccaaagaatgcagtggtggaagccggaatgactcttagctgacggccggcaagaaaatgcaaatagtcctacaacttcaaggaactgaattcagccaacaactccaatgagcaaggaaatggatttttccctagagcctccagaaaaaaatgaaagtggtaactttagcctggtaagacccacgctggacttcttctgacctagagaactgtaaagtaacaaatttgcattgcttaacttgttccttttgtggtaatttgttgtggccacagtataaaaccaataccaaatataattatttttctttttaaatagtcatagagacaaaggagaaatataaggaaatgtatgaagacaagtgatccttagtaaaactttttcttatgtgaagaagaccaaagctctggttgacctttgtaatctgagctcagtaatcattttcctagagtagtatttcctgatgaatggataatggtgacaaattgctactggtatatatgcatgagaaaaaaaatcagaaacctcaattcaagtcaaaattcatttatagctttgcattttaatgtggagtacttgattttaccaccatgtttccttttctgtcaaaaaagaagctatatttaacctgtttctccaaggaattttagttggttaccttcttaatagctactctgaaaagcaaaatgctattaggattcccttacgttattgccaagatgaatgtatcatggctgacctttcatttggaaattaagtcccttggtaatcttgttaaacattccccttggagcatgtcactcagagaaggatcaaatatatggtcctgtggttattcttaacattatgctggtgaagataaatttatgaaaacttattttagttttggctgggcgcagtggctcttgcctttaatcccagcactttgggaggccaaggcaggtggactgcttgaggtcaggagttagagaccagcctggccaacatggtgaaaccccatctctactaacatacagaaattagctgggcatggtggtggatgcctgtaatcgcagctactagggaggttgaggcaggagaattgcttgaaccctggaggcagaggttgcagtgaaccaagatggtaccactgtactccggcctggaggacagaggaagactctatctcaaaagaaaaaaaaaaggtaacatactagtttctgcttatgactttgattttgcctcttcccatttttttcacctaatagtgattagccatttctgtacaaaacatcttaatattcataagcctgttcacaacagtatgccttttcattatcagcaatagaaaaagaaggcctagagaaaaatagattgaaggtatgcatacaaaactgaaaaggaacgagtggcgtaatcacatttattattatgactaaatcattcttctggcaaaaagaaacctaaagtatttcaaataaatgttttaaattctaaatgttatgctaactttcacattttgtttctttcttaatctaactcattctgttatgatttggggaaggcagtcaatatggtgcctttactttggtgtgcaaatacagaactgaaaaatgtataagaatgaagaaatacagctgtaggtattaacctgataaccagcatgagagataatatacacagactgtaagaaaaccatgtagtctagactataatttaaaagggggttctggactagttaagaatgtgagccttgtgccagcctgcctcatactggctacttgatttgggggaattttttaaacttggcagaatgcctccgtgtgtaaaatgggcattataattgtacttaactttctatcattgtcataagaattaaatatgttaacatgtaaaaccttagaatatttccaggcacaaggtaaatactcagtaaatgttgactattattttaagttttaattttaaatgtgttcaaacgtacacaagagtagagagttgcttatatcagtatctggatcctttttagtaattacctaccatatacatatcatatagatgctagaactacacaaactttaccatgttttagatgtctctcttttttctcttacctttttctgaatattttaaagctcccattttatctccgcatgctcaaatatggatctcttaaaaatatggaatatgggcttaagaaaaccttgatgccattttcccaccttacgaaatgaaaagtaatttctccttggtgtctaatgctcaaaccacaattagattcttttctaatttgttttaaatatatatatatttgtagctgttggttggaatcagaatccatccaagttccacatattgcatgtgccatatcttctaggtttttctgccttcttccctcttttcaatgccaggtttgttcaggtataattaacattcagtaaaatgtatttcttctaggtgcacagttctgtggattgtaacaaatgtatgcaatcaatgtaaccactatcataatgaggaaattttctcatgcttttttaagttcatcctttccccactcaccttagtttcttgcagccacaaatctgtttttctgaccctgtagttttgtgtatctcttccagaatatgataaaaatggagtcatgtaatgtgttgtgttttgagtctagcttctttcactgagcataattatttttgaattcaccatgttattgtatattagtagcttgttcccttttcatggcttagcattattctaccacatggttgttgccacagtttgtttatctagtcatcagttgatgaacttttgggctgttttgtcatttggcttgttttgtgtgattataaataaatctgatatacacacatatatatatatataaaatatatatatcaacaaaggaagactttgcctcatctactcagactacctgtttatcctatggttcatataaaaaagtttatacagaaaaattagaattgctaatttctagaggatggtttcctagaagtatccagtcataattaatgggtagttgtgattttttttcttgttgtctttttcttttagtgtcattatgaattcctgggtttttcatatattcagtgtgtttcagtcaattttagtgattcttgttgatatatatatatgtttttgtgtggatgtatatctcatttcttttgggtaaatgcctaggagtattgacctaggtttactaggctgtgtggttagtgtatgtttagccttatgcaaaaccaccgaactgttttccagggtggctatgtcattttgcatctccaaagccatatacgatcatttcaattgctctacatctttgccagtacttgttattttcggtaattaaaaataattatttaaccattttaataggtatgaagtggtatctcatagtttaatttgcatttcctaattactaatgacttggagactcttatagtgtccttgcttttcgtagaccttttggtcaagacttctccaaaacatttgtttttccattacattgactgaggaaactgaaatggatgtcctatttttttcttcattgttttctttaacctgatctttgagcattcattattcccataaactggaaatacgcttgtaacacttggttatatttcaagtttgcttgttttgaggaaatgctttgtaggctatttatttcacattacatcacttaggagacatgaatgtctgattgacattgtgttcagatgctgcctccatcgtaaagttgcccgtcaactctttatctagttaccgtttcctaaattgattatttcattgggtgctacaaaatagtgatgcattctaattttactcttcctctggatttatcagtaggatttcttctgtaaaggaagactttgcctcatctactcagactacctgtttatcctatggttcataaaaagaggttatacagaaaaattagaattgctaatttctggaggatggtttcctagaagtatccagccataattaatgggtagttgtggtgattttttttcttgttgtctttttcttttagtgtcattatgaattcctgggtttttaatatattcagtgtgtttcagtcaattttagtgattcttgttgatattcaaatttaggatataatgagataaaaaataaaaatgtagaagcaggtagattttctttttttttttttttctttttttgacggagtcttgctcttgtcgcccaggctggagtgcaatggcacgatttcagctcgctgtaatctctgcctcctaggttcaagagattctccttcctcagcctcccaaagggagtacaggcacacaccaccacgtccggctaatttttatatttttagtagagatggggtttcaccatgttgtccaggctggtctcgaactcctgaccttaggtgatccatctgcctcagcctcccaaagtgttgggattacaggcgtgagccaccgcacccggcgcaagcagattttcatatgcacttgaaaccagtttattttctggctctgtgtatgcaccagtctcacatagacatccggaacaattttttaaaagctggtagttttaaaagctggtagtattttatggggtttatatgaattaatgatttggggaaaagtgttcctacttgagaacacgcagtttttcctatctttttgagtctttggatcttccactggtgttcaaatatcttcctcttgcacatttctgtatacatagtttatatttttttggttcctgctataagtgaggtcttttggttcattaaatatacatttgaaaatgcctatcttttagatgtattttcttctgtatatataaaatttttcttttctgtatgttaatgtttacattttctatattacttttatctcttaatgtttgcagtagtttttcaattgtttttcttggttattcagacacttatttacaattagggataattctgccttttcttttctaattgtcctgtctctaattgctttgccttgtttaactgtattggataacacttccaagacaatgttaaataagtagtactgacaatagtggatgtatttttcctatttctgagtttactttatagtatttctggaataaaatttagctattattgttatatatttggcttttattcttataatattattattataatatgtaaaaatggaaacataagattggtttaatatatggtactctgtctcagagctggccaggaacaacaaaaggcttttttacattagaaagtttatcagtgatgagatttttagtttttaaattcctggtaatgaatgcatttgcacagtgtgtgcccttgtctaccctggcctgcactccatgctggcttcctctgctccagcccctccctccctcccccggacaacatggccaacatcccttaggagcaattttctcctcctgcctctggtctacattgcaggtcccttcagtatccatttgctgcccgctttccaagagtgctagctcatccctgggtgctgtttccggggtgtgagctcagcattgtgttctcttagcactcattcaggctggtcactctgagtcacaaccacgcttggagaaagagtgggaagggtaagcattcctggtagatgaacctaaaaaagactcagaaaattgtgagtttaagggcatttgtgacctaaaactctgtgaagaacaaaagtgtcgatgttagtctgaaaccgacccatggagggaaatggaacccctgaaggggttgttggcctctgtggcatcctgtactcctcctttctctctgctgtctgcaccgggtgctgaacactcgtaggcctcagcacatcaccggcttctcctcttctctgtggtgtagtacatcttcaagtactatcaaactgtcaagagtgttgcattcttctgattactttctgtcaagagtgtcacctcctaaaactctgccctcccttcttatttattactgtgagctctgtcagccttgtggtcagatgtgtgataatctggcatctggcttgctgctgcttatttctccgctcggcctctggcaagttccctattctttaactgcatgccagtgttttatgccctattttccttgctcatagtttttcttttctacaaagccttcttcttttaggtgtttaggttttcttttcttttcttttctttttttttagcactttttctttttttgttatgtttctgttttaagtttgaattttatttttaaaccattcacatcatgctatccattacatctagtctcagcttcctctctgttggaaagatttgaattttttttaacttaatgtttaaaattttatttcaacagtttttgggagacaggtggtttttgttacatgaacaagttctttagtggtgatttctgagattttggtacacacatcacctgagcagtgtacactgtacccaatatgtcgtcttttatccctcaccacccccacccttccttctgagtcctcagagttcatcttctcattcttatgcctttgcatcctcatggcttagcttccaattatgagtgagaacatatgatatttggttttccattgctgagttacttcacttaaaataatggcctccaactctatctgagttgctgcaaaggccattgtttcattccattttacggctgcgtagtattccatgatgtatatataccacattttctttatccactcattgtttaataggcatttaggtaggtcccatatttttgcaattgtgaattgtgctgctataaacgtgtgtgcgcgtgtgtcttttttatgtaatgacttatttttctttgggtagatacccagtaatgggatggctggatggaacggtagttctacttttagtcctttaaggaatcttcacactgtttttcaaagtgattgtaccatatttgaattaatttaataggaaagcctgaaagaaaccgtgggctgagttattaaaccccattttaatgagatgaggaagctgaggcaccgagaagttacgtaacatgcccaaggcagagaggcagattcatgcccagccctctggcttcaaagtgtgtgcccttaaccactgtgctgaatgctgcccatgcacacttcctttcttttcattccttccttgccttcctcatccctttcctggcctctttctgtttctcacttctctcgctcttttcctcttttctctttcattccatggcactaatgtccactcttctagtcactgacacacaggtgcataaaaccatcattttccatgctctggtcctcattttatgaggtcctttaccaagtgttgctttctacatcatggctcaaaagccactcagggtgacgctgctaggaatgggagtccagcccaagaatagcaactttttgtaagggcagttcctcagcatcgcctgggtttcctctctaaacccagctcaaactattcatctttctcctcttatactccctgtcaatgccattgcagggcccatttctcaaagaataaactcaataaacacaaaaatgatatgctcacaatctggcccagctcaggtctgtggtcttaatttttttttagtcttgatttaagatcgtttatcttgtgattcctagattcatgattgatggatgcccttcaaagtaaataaagtgatgtcttaaaagcacattatagtaggcttagagacttgccagagaacttttttcagaaagaagggcaggaagattgtttcaggccattctaagatgaacatattcacacatttagtgccaagatcctggggatatggaggaaatgtgtttactgagttttaagggtcttgagtatatctgatatcttcccacatagatttagtgaacaaagactctgaagttccttcattgttttattaacttttgagagtcattactacctctgaacaccatttacatttgtaagacagtatttcacttggacggagcttcagtatcttgttcatcatcttttataatattacttcataccactaatttactgtaagaacagttatttgttgtaataatctttagctttgggttgagctttctggataaagatatacttacatttattttagcattgctatctgtactagtatcatgaaaatatctcgagttcctatcagtctcaaatttcttataactaaatgatatctttgaagttgataatccattccagaaattaattaaaccatagtgtcttatagaatggaaaaaaataagttttctggtaaagtatatggattttttttgaaataaataattgtatagaaaatacactgagaaaaaagccagaataatcactgaggaggaaaaaggatgggaagcaccatccattcaaaaaagtttagagtttcctgtatttatagagcactttttccaagacttgaagcctcttggtgtaggcatagggttaagattgacacacaaaatactgggaaacaagtaatctaggataagcaccgtatagaaagttcacagaataacagatgtagtcaaatggaggtaagaccttttagcctttggcaatttgggtaaattaatgaagggatcataaattgagactattaacagtactcctctcataaggcatttggaggactaaccaggcaaagtgcctagcacttactgagtgctcaatacatgttatcagtgggaataactgaagggcaatggtgtgaaacagtcctagttctgtgttattagctgtacactttcacctgttagctgggaggaatgacattctgtcctgaaatggagcaatctgagcagaatacatgcctgaatagaaggccattacccttttcttctaaagtgatctaaggccgtgccaccagcaggccaaggcagtccaccagaagtggtttttggggtctgtgccactgcttggagagatgattagaaggccagagttctgtataataaaatagatgtctataattttagcctggagaaattacttatcttttctatcgtaaaagaaataattggtcagttttcttcattacaatacccactggcttataaattttctaaatcttacctttatatacttaataaaatgttttaagttgtctccactattgtccttttttttctttaaaaattcattagcctccattgccatttagaaggtaagacatacattattgagaagatctgtttaagactttccccagactagagttagctaaaaacatgagaagttggaaagtatacttaatatgataaagaagaaagtgaattatatgttagacagcactgttgtggattaaggagagaacgatgtatggcctgaatcataggtgctttcctgcagcattttccagatctttttttttcccccccccgagacacgaatttactcctaagagcatcaggacggcgtggaaactaacaaatgactattgaagacttaaatcaaattggtgaagtttactatcgcaccaagctacaggtgtcttctaacttctctctaggaattagataaatgatcttggctagcacaaaaatgttcagcctaaaaatttagttaaaaagcaaagcttggagctccctcttctaggtatacacaatcaaagtcaatgattttactgttgatgacactttgttttccgtaattgttactaggatgtctgagagattaacgtttcacatggtttttccaggggttattatctgttaccggatcatgtgtctcagtttttcttttaagtttaacctcaagggaataaaaacatttctttaaatcccaatgaaaaccgttttcttttgtcatgcctgctgtgactgctcctttgaggaggcgggtgagcttttcctctagcaactttgctgaaacatgtatacttaaccatgctctgctggtccatattttgcaaacatatatatggaaagacttttttcttgttcctgtgttttttgtaatacttttcagggaatgaaacaattgttatattttcaacagttcttcagatactgttcttattttttcaaatatgatgaaaatctcttgcagtttagtctatagaatatcttcagatagtcaggagccatgtgatactttctaagtaatggggagatgattatgataaagtattgatatggagaactttgcttgctgaaggaatgacagggttaaaaaatatccttcctttattctcatctatcattttctcaatttgacacacttccataagtacatatagtcatattttaaaacttacgctttcgtcctttattaaaaaaaaacatcagatttgctgtgttaggatacaaccttttctatggctgacaaagtcctgtttatatgaaatattggcccttttacgtttttttcatgttgcaggtaactagagctgcaataaacattgttgtcttgcaataccagtagtttgcttttccacaacttatctgatgagaaaacagcactgtgttttatctgaaaagcaaatggaaaatgagatattaccaaaaccttttaacatataaaaataactactttaattttgttttcttttcagatgaaaacagcccttcctgaataatcagttttaccattttgttttgttctaagcacaaggactgaatggcagtgaggtgttgtttttctctctcccttcttctgtcttctcttataatgtattttatataatgctttaggagacatgggagatatctttatgttggtgtacaaattcaaatgtccaggctaagaagctgaatgaaagttaaacaacaaggttttgctatttataagaagcaaattactataaatctctactatcaataaatgtggtaatttgaattttccctgtgaaattttaattttaatgacttcatattggataatttaaccattctcgtttgggtcagaatattatttaggaaaggctgtatcaaaagatcatttatatgaaaatgggttgtgaagactatatttataaatgttatcctgtggcattttaaaccatgaccttgaagaccgtattaagacaagtgatatgatagaatgctcctgacattgatgcattatcactcctaatgacttggttgaccataacatagactcattcatgaagactaaccctgagggggaaaaacagcagaatctgtcataagattcatgtttaattctttaaccttcacatctttgctttgtttatggaaatattccagttatgtatttcttacatggagtcccttcacaaccaaatcatacatagaaagagctctgctgctggctggtgctcagggcatcaggtttccatcttatttttagtttttctaatctttctgagcccagaagaccaacagttctgaggggatactggtctcttttaaagtcttagagaaagagaaagagagagcgagaaatgggggtgttgctttctgaaatctaatctgtgtcttacgtatgaggagaatgttaatacatatgttctctttttaatttttttttggtcctgctgcacctgatttgttattttggaagctgttttattttatcggttgtttcttttgaaaaaaaaattttttttttttttttttgaaattgactgctttgtcttttttacattcatttaattttttctcccaaaggatgcttatttgagatggtttccatatttctcctctagattaaaaaattcaatcatttatctttctgttttcctcttacttagtctcactcacacttttctgactgctttgaaagagtgtgaaaagatgaattacttctttttgctttttttttttttttgagatggaattttgctcttgttgcccaggctggagtgcattggcacaatctcggctcactgcaacctctgcctcccgggttcaggcgattctcctgtctcagcctcccgagtagctgggattacaggtgcccaacaccacgcccagctaattttttttttaattttgtatttttagtagagatggggtttcaccatgttgaccaggctgatctcgaactcctgacctcaggtgatccacccgccttggcctcccaaagtgctggaactacaggcatgagccaccatgcctggccgattaattacatcttgtagtgatgccagatgaacacctgatcatgtgggaaaatttcttcattttttatagtgaaatttttctgagatgtggggggtgctttttgtttttttaacttgtttaatttgttcttatcttctccgcattcagcataataacacaacatcacacacataccccacacaaactcttgcctttgtgagtaaaaaacctggcttgtggcatgtaatgctatattaatttttgtatgcatccagtgaaaaaagtttataatccatgtagcaaaaacatattttctacagtgcccagtcctctgctggcccttaggagataatcattgattgccacatgatatgcatatgatctgactctatccagctaatttttctgccttggtcaagtcctttgtgaaacttctttctgatttgcaagaagaactgacacctcagtgatttttttctaaggagcttctcagaggtaaattcagtgatgtgtgcagcctagcaagtatttgtttaatacacaacaatcctcagaactatgtggggtatggagaagccaagctacgcatagttttccgtctataaaggagattatcgtccatctgtgggcaaaggaagtaaatgcaggaatagtttgacaaaatggaattatatatatatttttacttttgtgtaaaatcctactagaacattctaattccagctccatctctgtgagaactctctcaaattcattttcttcctcatcctgcctggacatcatagttgaatgactctaatgagtactcattggcacttcaattccatcatcagcatgttcagcataattcactgtgatgtttctcaaccataggataatacagcctttgcttgaccatctcctgagcctgggatacattgctacagttgaggacaattatggtcacagttgagatactgttgtagaacacaatggaacagtcctcagttaatatgtaactcttaacactagattttctaagctttacatttccggtgtagtatcttgctctgaccacagccttctttctttccacttggtctagtttatcttcactcccattgctccagcttttttccctcaagagaaacagcctgccttccagcctacctctaggctggtcaattcctcccaccatgtcatcctgtccttggtttctctgccgtccttcttctctatttgactctctctcttgcagtgtggctgaaatgctgactcagcatctttcttgtgtctgtcactcccctgcttctgtgcctcacctttacagcaaaattccgatacttgttattacttcctttaccttcttcttcctatacctatgggatgaacacttcctaaaaaacgatcatacagtgatacaggttggtatcattgctaacacatggtcttcagttgcatctgagccccagtgctgcctttcttttagtttttttttttttttttttttttttgagatggagtcttgctctttcacctaggctggagtgcaagtggtgcgatctcagctcattgccacctcggcctcccaggttcaagcaattcctacacctcagcctcccaactagctgggattataggcgaccaccaccatggctggctaatttttgtatttttagtagagatgaggtttcaccatgttggccaggctggtcttgaacacctgaactcaagtgatccaccacctcggcctcccaaagtgctgggattacaggtgtgagccaccgcacctggcctcttttacttcttttttattgttatgtgctcagtcatttcctaggatttttttctaaacccccctactgattgccatccacttccactggatcccttcctgcttagagcagctgtgtagcacagaggttatgagaagacactcaccatccagactgtgttcaagcctttgctctgcaagctattttatgatcctaggtgatttaacttctctttgttattatttcttcatctgtgaaaggaaaataataatggctcctaccttatagaatcattgtgaagactgtatgatttagtatttcttaaaaacagttagaatagcgcttggcacatagtaggaactttgtaagtatcagtcattactgcctattttattattgaacattgaggctgttagacctcatatctctccgttttgatccttcatatctgcagttttgtcaataacccattcaatcttagtgtatttccttcattctcagaaatgatacattaagagggcatttctcttcctgtttctttctgcctctagcctactttcatgtttatctctcttttttatatatatctttaatctattccttgaagtgaaatctatactctgagcccacaagcatactaaaatttcttccattctaaaaattatatcatcattatcattattatcatctacatcattatcagaaacaacaaaagaaggaaaaaagaatattcctctgatatttcctcatatgctttctcaggtcctttcttctttttttctcttatatagattttttttttgaaagattgtgtttcccccaaggtgcactaccttctggctataattgctgatattgatcaaggaacctaatgattagatgactgtgacattcaaggatttgctttctctctttagtccactcggactctcttctggatttcacagttagccagtttcgactgtcataacataagcacttgtggtcaaccattccactctcacccggttctgcacttgtctctgacttagccttgtcttttttcataggtcttcattctatttcctaaatatatgctttcctccaggtcccatttttcaccgtgatcccttgttctacgtatgttcccgtggtaatttaatctattcccgtgatttatcttctatatttactgtatgtgccagtgactcacaaatctctatttctagcccagaactctctcctgagccttcagaccactttccaaatatttcctagatgtgaacacccataggcatcccaaattcagtacatctaaaattaaattcattatgctcccaattgtcgtattgcttctgtatttctatcttagtggatgcctgcactatcaacccaaatagcccagggcgaaaaccaggtagttatcttagagttcttcctctccattctattcagcatacaagcccctgttgatatcactatgcttaaaattgtatctcacatctgtttcttccttagtcttaactctcgctacgctaccttaatttagaccttcgttttcctttatatgagctattacaagaatctctgaatgggttttttccttaatgtcacctactacttaatctatactgtacacagttgacaattatcatactagaacattaaactgatcatgtgctgttttgcttaaactttttagatggtttccaactgccttcattttataatccaactcttatgcagtattctttatcaaccagcctcagttcttgtcagaatccctctgtgagcgtatgacacagatccattccgccatgtgatactcttctctttaatgcctacatgcttctattcccgtcctctggaaaacttttatttatttttccagacctggcccaattgctctatcttggggaagcttttcacaatcattcatgaatttcaaacatttatttactctaattttcaaagtgttttttagatggcagttatcacatcggcctggagctatttgaattcccaaatggctctatgcattcctatattcccaacactcaggacgctgcctggaacttagcaggtgcttaatgaatgtttgaatgaaatttgaactaagtattttagaaagttacaggagatagtttgtctcattggagctcagagtcaaggtagggaaaatggggaaaaaaggagggcatcaaaggaagaaggaagactgtagggagcccaaatgttataatatatataagttccccacgaagagaaaaggaagaaaccatgaagaaatataccttgtgtataagagaatattgggaaattgcactataaaaggaaaaaagaatataaataaagctctggcaaccagtgcacccaaggaatgaccagacagcaatgacagtggaaggaaaagggcaaccctgtgagaaagaaaagcctgagcagcgcagattgtcagagagcatctgcaaaagaaaggtgagagctttctgcaaaagaaaggcgagagctttctttgcaactgctttgcacatttctgctaagtaatgatgctacaaagccacacatttttccatttctctctaaaactccttcaaagagcactgagaccaagctgtattctctgtaatttgcccttagctgtatggaaaacatctttgacctacagctagtatcctatgcagaaaccttccagtgctctgctattctccagggcttttcttgcagaaaataaacaaagtgatgttctgtagaatgttgaccattattcctgttcctgaaaggtactggggaagataagtccaggacagtcatgagaatcactcttctcagttttgtaaagtggggtggacacatccaccttgcatagagctgcacagaacttccactgtttgtgccaatgtggcctcatatatataggtcagtttgaaacagtattaaatattcacaaaataaactgtacgtatatgcatgcacatgccttttgtgtgtgaacaactgaaacattctctgtttgttttcgccttagaaatattagctgcccccgtccgggcgcggtggctcacacctgtaatcccagcactttgggaggcccaggcggcatgatcacaaggtcaggagatcgagaccatcctggctaacatggtgaaaccccgtctctactaaaaatacaaaaaattagccgggcgtggtggcgggcgcccgtagtcccagctactccggaggctgagtcaggagaatggtgtgaacccaggaggcggagcttgcagtgagtcgagacggcgccactgcactccagcctgggcgacagagcgggtctcaaaaaaaaaaaaaaaagaaatattagctgcccccttagagagtctcgcagatggaaaatatgcaacagtgggactgtggccgtgatagatctgaaaggaggacccaggggccttagatctcttccattgcaaggtcctataaaatatttttaaatttacaaactttattttttagagcagttttaggtgcacagagaaattgagcagaaattatagagagttaccaaatatcccatccccacacgtgcacagcctccccagtgagacccagtactatagtggtatatttgttacaattgaagaacctacactgatgccctattatcatccaagatacatagtttacattagggttcactcttgatggtgtgtattctatgtattaggagaaatgtataataacatgtgtctaccactgatatcatacagaatagtttcactgccttaaaaatcctttaaaaatcctttgtgctccacctgttcatacctcccacccccttaacctcaagcactgaccactaatctttttactgtttgccacatacttagaatcgtatggaatgtcatacagttaaacttcagaacttatagttagaatcatacagtatgtagccctttcatattggcttcttagtaataatgcatttaagtttcttctatgtcttttcatggcttaatggcacatttcttttcagtgctgaataatattccattgtctggatataccaatttatccactcacataatgaaggacatcttggttacatccaagctttgacaattacaaataaagctgctataaacattcatatgcaggtttttgtgtggacacatgatttcatttcatttgagtaaacaccacagagcatgattgctggattgtatggtaagagtatgtttagtgttgtaagaaactaccaaactggcttccaaagtggctgtatgatttcgcatttccaccagcaatgaatgagagttcttgttgctccacatcctcgccagcatttggtgctgtcagtgttttgtgttttggccattctaagaagtgtgtagtgccatcttgttgctttaatttgcaattccctgatgacatacgatgtggagcatcttttcatatgcttatttgtcatctgtatatctaatttggtgagatatcttttaaggtctttggccaatttttaaattaggttatccattttcttgttgagttttaagaattctttggatattttggataacagttctttatcagatgtatcttttgcatatattttctcccagtgtgtgtattgtcttctcattctcttgacattatcttttttggagcagacattttaaattttaataagtctagtttatcaattatttctttcatggatcatgcctttgatgtatctaaaatatcattgtcatgctcaaggtcatctaggctttctcttatgttatcttttagaagttttatagttttgcattttatgtttacatctgtgatccattttgatttgatttttatgaaggtgtaaggtctatatctagaccgctttttttaatgtgaatatccagtttttccaacaccactttttgaaaagagtatctttgctccattctgttgccttctctcttttgtgaaaggtcagttcactgtatttatgtgggcctatgtctgggatctccgtcctgttctattcatctatttgtctctccttttactaataccacactgtcttcattactgtagatttatagtaagtcttgaagttgggtagtgtcaattctctgactttattcttctccttcaataatgagttggctcttctggatctaaaatgttttttaacactgtattatgataatgagaaaaacaaacctataagtattaaggatataaacagaaatatgaataaatatttagtctgcttctctatggatattataccattgaacataaaaataaatctcatggatatttttatgaatacataatgcacagaactaaatttattttattatagattaccctaagattctctgtggcctattaattttatgatacttaatatgagatttttcctgcaataagactgtttggacactattgctaaatagaattatatctttgaactgaatgtccttcttcagcattctttaataaaattggagtagtatcttgtcagaaaaatgggaatgaaaactgtacctggaagtttaggacatttggagtaatatcttaggacacaaaaactcagtctagaaaaatctgagaaatttaagtaagatatttcaaaaacgtttaaaaaatttctttaaagtcacattttttctgataccaagggaaagtttctttgccattcgtactttgacttcttgaaacagcatcctatttagaaccatactgaccagaactagtgaagagatattggttgaattcctaaccatgtcttgtgaagagcaacagaagaatttaggtctagagaagaaaagtcttgagggagtagaacagagagattgcagaaacaggtctaagtttctccacatatctgaagagtcattttgttaaagacagattaggctaattttctgttactttcagaatgcaaattaagcgctaattacgcataaaatttcctacgcataggaagagaataatagcagtaagatctggaccctaaattgaactacaccgagagatagtgagctccttgccccttagttattttattttatttttgagactatgtcttcctctgtcacccaggctggagtgctggggcatgatctcagctcagtgcaacctccacctcctgggttcaagccattcttgtgcctcagccttcccagtagctgggattacaggtgtgtgccaccatgcctggctaatttttttttatttttagtagagacagggtttcgccctgttgactaggctggtctcaaactcctgggctcaagcaatccacccgccttggcctcccaagtgttgggattacaggtgtgagtcaccgcacctggccaccccttggttgttaaaagcagatgtgtgacctgatgtatggaatggattcatatatttggtgaaagcttcactgtatggaattataaatgtataaattatgttccacctcactattgaacacgtagaaaatataaataacaatgaaatatccttttcacttttcagttaagaaaaattaaaatatatatgtatgtgtcttagtttgggctcctatgacagaataccatagactgggaagcttaaacagacatttatttctcacggttatggaggctgttaaggccaagatgaaggcagcagcaaatcctatatctggtgagggcactctttctggtttgtatactgccatattctctttgtgttcccacgcaacagggagcagagagatcatctctctgctgtttcttataagggtgctaatcccattcatgagggctctatccttatgatctaattgtttctcaaaggccacacctcctaataccatcacattgtgggctacaatttcaacctataaattttagggggacacaaacattcaattcgtaacagtgtgtatgtatatatgcacacctacacacatgtgcacatactcctccaatgttagggaggataaagagaaagaatagttcacattgcagatagaaatatgaatttgtcaattattatgggaagaaatttgtcaaaagccttgaaatgtacatttccaggaggtacgttcttatgtataagactactcttcgatgttggcttatcagaaacataacccaagataagcacttcacctgcatgtcacttactaagcaattgttctttggatgactggtaaggaaatgggaaaagtaggatagttaagatcatgtgacctcaagccatgtcctttaggagagcagcttgaggagctacagtatgtacataccctgcaaggttgtcctgattcgagccagggagctgggctctcatactctgcaactggcattggttaaggagtgaggtcatgtgtgggcttggaagctccatagcctgagagagagagtccaccaaagaagggttgtgggtatcagctgttagaagcaaaagcttcatgaagtcacaaaattggaaaaagaatatctggttggaacaacagcatttactagtacaaatattcactgcatgataaacatcacattgcttaagaaagcaaacgtgttaagcataacactggtaaaatacagactttccagctatgaagcggtgtgacacagaagacttccataggagttaagctgtcagataatgactactatgcgtatcacaattacaactgaaaatacactgtaaaggtagatagatacacagatgctccctgacctatgtccccaccataagttgaaaataacatgttgaagatgcatttaatacatctaacctactgaacatcacatcttagtctagcttaccttaaacatgctcagaacactcgtgttagcctacaattgggcaaaatcatctaacacaaagcctgtttttaaaatacagtgttgaatatcacatgtaatttattgaatattgtactgaaattgaaaaacagttctgtgggtatttgtgttatagtgtctgctgaatgtgtaccacttttgcaccgtcttaaagttgaaagatcgtaagttgaaccatcctaagccagagaccatctagagttataggtacagaaaatggaaagatgtaatgaccaagtaggatttatctcaggaatgtgagtttggtttggttttagaaatggtttttaacataattcatcagattaaaatatggtttgaaataacgtgatcatcttgttaactgcccatataaagtacttgataaaattcagtttacccattcatgatttaaaaaaaaaactctaaaacagtaggtatcacaaggaattgactaaacatttacagcaaataaatacagttataaaggcaaggaatcttttctttaaaatcaggagaaaatgatacccattatcaacttattgtactcatcactgtacttgatattctgcacatgatagtgatacgtggaaaagaaaattataagaattagaagcaaaaagtcaaaactgttaccattattaaatgatagcagtgttcttaaaattgtttaaagtacaaacaagatattagagctaatataatgaaagagaaaggtttctggatattaggccaacatataaaacacaacagcacccctctgtacttgaaacaaagaatcaaagactgtaaacctctgaatagagctagcaaaagtttcataagaccttcatgaaaaaatcgtgaaaccttattgaaagacataaagtaacagctaaataaataaggaatttataaaatgtttgggatgagagaaatcaatatagtaaagatgtcacttccccaaagattaatccataaattcaatggtgtttcagtaaaaagaggaacagatttttcatagactgtggtaagacgaatctgaagttcacatattagtcaaaattcccaaagatagtcaaaatttacttttctcgtaaggaggctttattttaaagccacagtagttaaaacaaagggatattcatgcagggaaagtcaaatagaccaaatgaacaaaatagcagataaatgaacccacatataaatgagtgcatcacatgcatgggaaaaaaaagatagaaaagttactgagtaaatgatgctagaactttttactgtccttaagaaaaaagatgaaatatgtgcctcataccacatattaaaaattaattacagatgaattagagacccaatttaaaaagtgtaacattttagagaaaacttagaagataaatccttaagatcctgaattagggaaggatttcgttcataaaacatacaaacttagactataaaggggaaaatggtgtattcagttattttcaaaattaaagctttggaatgacaaaacttataatccaaaaactaagtgaaaaaagtatcatgtattagagaagattgttgaaaaaacatatatttcctaatggactttcactcatcttatgtgaagaattccatagtaataatggaagcaatctcataatttaaaaacgagccaaagctctgaataccccgtcagaacaggcaactgtcataggaaataaaaaccccaatacatattaaactaactgataattagagcgtcatacgtatcataagactgatagtgtaagtacattttaagagcaactgcctgaaattgttggtggcaatacaaattgtattgaaagacataaagtaagggctaaataaagttaaaatcatgtgacctcaggccatgtcccttaggagagtagcttgaggagctatagtatgtacataccccacaagtttgtcctgatttgagccagggagctgggctttcttactctgcaactggcattggttaaatggtgaggtcatgtgtgggcatgaaagctccatagcctgagagagcgagtccaccaaagaagggttggaggaccctgacttgggggacagcagtgaaataggatgaagatgtatgaatcctatgatcctaagattcttttcctagtcaaacacactaggggcaggaaccagctacatatatagtgatattgattgcagtgcaatttgtaatagtgtaaacaaaacatattctcagtgtgtatgtctgtgtgtctgtgtgtcgttattcagtgggaattaccacttctgaatgtgtatcacttttgcaccatcttaaagttgaaagattgtaagttgaaagtcaattatggagtaagggaggtgggaagatggcatgaggccagatttaaccctgtctgaaaatatatgaaatcatgttttttaaggcagtagccactaggcttcaatgtacagtgatctttgagagatgagccataatactgccccagcctactagactgagggagttttcggggaacaccaggggaaaggcattccagtcagatcctggtggattccttgagttgaagaactgagttgcaattgggagaatctgaagtgtctagactttcaggacagaatactgaagaggagagggctgtacagagagagaattctggagatcttcagcaagtcctccttttgtaatcagctgagtactgatcagtgtgtacatgtgaggaagagacctgaggctggtgaaagagccactcaaaaggattagaagggaatgtgctgagtattcacatacgtttgggtctaacaaatgtttacaccagcaagactggaaaatctcataaattaggaggtactggagataggatgagactcttaccttagtactgggaaatgattagccccagaatgattaccagttttgtcctgcctgacaaattgtagcaagactcaaaaggatgaagctgtttcaagtaacttaactgtgtcacagaacaaagcttatgaatatttatagaaataccaaaataaccagaacctaacacagcagaatacacagtgtctggcatccaatcacaaattaccaggtaagcaaagaagcaggaaattatgactcataataaggacacaaagcaatcaatcaaaactaattttagaatggacacaaatgttaaaattagcaaagacattaagatagctttatgactgtattctagatgttttaataagtcaaatagagccatagaagaaatttaaaagactcaaactaattcctagagatggaaactacaatgtctgctgtgaaaaatatactggatgggactagtggtagattcgccatgataggagaagtagattagtgaacttcaagacacagcaataaaaacatcatgatggagcagaaaaaaaatccaaacctttgaaaagagcttcattgagctgtgggacaatgtcaactagcataaaaaaaattttgaagaaataatagctagaaatattctgaatttgatgaagactataaaaccggagatcaaagaagtgaaacaaactgagcataagaaacataaagaaaattccaccgaagaatatattataatcttatagttcaagatcaaggataaccataatactttagaagcagtcagaggggaaaaatacattgtgtacagtgtaaaaaagatatggaaacagtatatttctcatttaaagcaatataaggctaggcatggtggcttatgtctgtaatcacagcactttgggaggctgtggtcggaggatggcttgaggccaggagtttgtgagcagcttgggcaacattgtaagacaccatctctacaaataatgatgataataataataataataaactagctgtgtgtggtggtacatgcctgtactctgagctgctcagaaggctgaggggctgaggcaggaggatagttggatcccatgagttcaaggctgcaaagagctatgttcacaccactgcactctagcctgggtgacagggtgagactctgtctcaataaataaataaaaataaaataatacaagagagaaatcagtggaattacatttttaaaatgctgaaagaaaaatcaatgtaaacttttatactcagcaaaaaataatttaaaaaataaaggaaacataaagcattttcccagacatacaaaaggtgaaaaaatcaataatatcttgcccattacaaaaacagtattcaaatatatattttatgatgaagaaaaatgacattagattgaaatatgcatcaacatatgtgaatgaagggcaaagaaaatggtagctataagagtaaataggtaagaattttatcaagtctcttgaaaatattgagtgtttttttgtttgtttatttttgagacagagtctcgctctggcacccaggctggagtgaagtggcgcaatctcggctcactgcaagctctgcctcccgagttcatgccattctcctgcctcagcctcccgagtagctgggactacagacacccgccagcacgcctggctaatttttttgtatttttggtagagacagggtttcagcttgttagccaagatggtctccacctcctgacatcctgatcctcccgcctcagcctcccaaagtgctgggattacaggcgtgagccaccacgcctggccaatattgagtgtttaaacaaaaataataacatcatggtatagagtttattaaatatataaaagtaaaatgtatgccagttgaataagtccataagaatagaaatgtcagtgccctattttaagattcctatcttacaaagtggtatagtatcactcgaaagtgtagtgtgataaggttaaaaacatactataaatttgaaagtagttgttaaaatgatgaactaaacaatgttaataagccaacaaagaaaataaaatgcaatttaaaaagtatttaattcaaaagaaggcagaaaaagagttttcaagggaacaaagaatagatgggccaaagtaaaaacaaataacaagatgatagacttaaatttaatcatgtcaacgattacattgaacataactggtttaaaacaatccaattaaagagcagagagtatcagattgtatataaaggcaaagccgaagtgtatactttgtataagaaacacaatttaaagatagaaataggtaaaaggatggaaaaaagatataccatgataacaccaaaggaaaattggaatgactacacgaatattagaaaaagtagatttcagagccagtattattactagggataaagaagttcatttcatagtgatatagagatcagaagaacattttacatatgcacctcataaaaaagcattagaatatgtggcacataaactgatggaactgcaaggagaaacagaaaaatttacattataatcagaaatcttagtgcttaattgaatggagcaagtagacagaaaatcagcggggacatagaagacttgaacaatgccatcagctaactggacctaatcgatgtttatagaacactccactcaataactgcagaatacatacatttttccaaatacaaacaggtaattttccaagatagaccatattgtagtaaataaaacaaatttcaataaaataaaaataatttaaggcataaactggtaagttgattactgataagtatattctcagacaacaatggaagtaaattagaaatcaataacaaatctggaaaatcccccaaatatttgggtggcaaataatatatttgtaaatatccgtgtgccaaagaacaactctaaaaggaaattataaaatgttttaagttgaatgaaaattaaaacacaagatatgcacatttctgggatgcttctgaaattgcacttagaagggcaactcagcacccaacacatataagaaaaaagaaatatctcaaattaattgattcagtttcaccttaataatctagaaaaagaagggcaaattaaactaaatgtaaacaaaagcagggcaaaaataatcaaagtggaaatcagttaggtagaaaagaaaaacagcagagaaaatcagtgaaaacaaaggcaggttgtttttttttaattaaatctgataaatttagtaagtctctagccagacttagaggggggcgaaaagtagaaagattcaaattagcagcaggaggcatgagagtggtttcatcatgaacaggtcttcaggtatgacaaggataatagaatattttgaaaaactatatgcctataagttggacaacttaggtggaatgggaaaattctttcaaggtcacagactaccaaagctcactcaagaagaatagataactgaatagctctctatctcttaaaaaaggaatttgtagttagaaatcttcctacaaagaaaactttatgtgatgtggctttatcattgactttgcccaaacatgtaaagaagaaatgatgccagttctatacaattatcttacagaattgaagataaggtagtcatttttatctcattctatatggccagcattacctgatgccaaattttagggtgaaaataccaaaagaaaatacaaaacatggaagtattcttcatgaacataacatgcaaaatgctaaaccaagtgtaccagattgaatccaacaatatagaaaaatgtgactatatcatgactaagtgagatttatttcaggaatgcaaaggtagtttgctatttggaaaccaattagtgtaatcattatattaaaaatgattaaagtgaaactacatgatcaccttagtggaacagcaaaaagcatttgaaaacttatattcattcattataaaattctcagccaattagaaacagagggaacttcttcaaccaataaagaacatctacataaatccttcagcaaatataaacttaatgttaaaagacagatgagtcttatattttcctttggatcagggacaaaatgtagatgtccactctccttgattttattcagtattgttctggaggacttagccagtataattagggaggaacaaaatatgtagattggaaagcatactaatttggagaaaatggggttgtctgtgaaaaaaatctggtgagatcaaggaaaaatctactagaataataagtgacttttgcgaagttgtggtatacagaagaaatcaaaaattgatatttaaaaattaatatttataatagcatcaaaacatatgagttacttagaggtaaatctgacaaaagaagtgcataatctgtacaccaaaaattatacaatattgctgaacaaaagcaaagatctaagtaaacaaataaactctgtttatagatataaaaacccaatattattaagctgttaattctcctagaattaaggctgtcagataacatatacgacagccagttatttttaaattttctgtaaaaaactaatttttagcataagtatattcatcttatggttttatgtgctgtatctgttcaccctacttcaaattgattatatgcaatctcaatcaaaattccagtaagatttttggcaaaaattgacaagctcatttgataatttacatggaaattccaaggatccgggaatgcaaaaataacttcggaaaggtataagtatgttggaggactaacagtatgtgactcaagacttactataaaggtacagtaattttgccaatgtggtgttgacatcaagctagacaaatagaccataagaaaatagaaagtccaggaatagaccagcatgcatatggataactgatctttgagaaaggtgcaaaggcagttctttgcaggatgcatacatagtcttttccacaaatggtgccggaacagttgtatatccatatgccaaaaaaatgatcttcaatccataacttacatcatataacaaaattaaatacaaatggaatggattctgacgatacaatcgaaaactctaaaacttctagaaggagacataggagaaaatgtttgtgactttagatacactgcaaaagcataatccatgaaacaaatcaataaattgagcttcatcaaaagtaaaatctttcgtttttttgaaggacattgttataagaaggaaaagatcagccatagactggaagaacatctttgcaaagtatatatctgataaagaacttatgtccagaatgtataaggaactcttaaaatcaataagaaaacaaaacagtgtaacatttggagaaataatttaaatagcatctatcaaagaagatataaatatggcaaataagcacgtgaaaataatttcagcatcattggtcactaaggatatgtaaattagaaccttaatgtgatacacactattcacacaattaaaattaaaccgattcaactgcaagtttttgtgagaatgtggagaattgtttctcttctactcccctttcccacagtggtgggaaaatatagtggtaaaaatactttgaaaagcagttttccactttcataaaaagttaaatatacatctaccatatgtctgtacaaagacttgcagatgaatgtttatagctgctttatttataatagccaataagtggaaataattctaatgttcatcaacaaatgaatatataatgcatgtcacaaatgctactcagcaatgaaaagaatgaattactgatacacattaaggacctggatgactctcaagatgattatgcagagtgaaagaaggcagatgaaaagaatgcacatgtatactataggattccattcatataaaactctggaaaatgtaaagtaacttttgacagaaaatgcatcagtgatttcctgtgaagaagggatgggatggagagaggagggagggaggaaatgatgaaggagcacaaggaaacctttgagggtagtgtgcattatcttgtttgcggttttttctgatttctcatgttccgcaaattatcaaattgtacaccttaaatgtgttcttttgtactagaataaagttgttaaaaataaagtaacatgcaaattggtgagtacaatatgatcttgaagaaccagtaacactagcacacaaaacaatggaatggatctgtaggtatccaacactgataaatctcaaaaccgtaatcattactgcaaatggatatatgtagtaaaccatctgtacaaaagtttatatgaaagtttcagataaacaaaacaatagtatgtatacctaatgaatatataagcgttgattaaatgctggaaatcatttactctaaaacacagggttgatacccaccaagtgaacacagcagttactctttggaaggaggaagaaaagatgggataaaacttgagttatttctgaaatatttttctttaaaatgtttaaaatgaatttggcacgcttaatatctttttaatcttgagggcaggaatgtagctgggctcctattatgttaacttccatacttttctgtttcacacatttcacttttagtagtcatccagctctacaaggaagccaacctacctgtgcaaggaaggttctctgttcagagctttcgtacaatgaaaaagagagacacagttcccgccttcaaggggtctctcgactaggcacgaggaaggcattaaatacagaattaaacaaataactcttcagttaaattcatgaaaagtgcttctacagtgaacgtatcctgaaaacatattgctgcttttaagtctgaggatcaggaagggcttctgtgcagaggaatgtttaaggtgagccactgcggaggagtttattgggcagggtagttctgaggcagggatgtttgaagaggaaattgcaatgcgtgttctgtttgcctagctttcctgcagctagtctcttttttagtcatctgatttactgcagtatgagaagcataaaccttgatatgattaaaaaatgaattttacttttttgcttgaattatacaaagtcagcgatataaataaccacgctttgacttgcttaatacagatgtcattatgagttaaatgagtggatcaaccaccagtacgttgacacagaagggctgttttaaatgtcacttctctgttacctttctcccatctagcagatctcccatagacaccaaagtttaacgaggttgctagaaccctgcagaatctgctaagttttcacctactgtgcactaaatgttattctagaatgctttatgctcagcacgttttccactatgccaatgttgtgagcttagcaactgtttgattatttcaaaaacaagtttatgggttagtagccagtcctggtagaacaaatgaatcctgagtgcaatattctgtatgtcagaagctggccaaatggttgctgtgctccagtattcttttagaataatccatatcagacagatgtataaggtagcaaatgtttcatatttgctttactgtcaactaaggggaagccgtttgaattttaataaatgctgacctcaaatatttttgaacaacagtttctaaatcaaaatccatggctttgtttttgttggaggtttgaatgtttcattgttaggtagactgttttcataacaaaccaacatatgagcacctgctttatagaatcctccctcattattatagaggcaatctacattttctagccccaatgattcactattagaatacaatgccgtacacttttaaaacgttgtttctttggcctgagtgaggattttacattgaattttaatttatatttgttttggggaaaaaaattcagatgattgtagaatgagctctgtttctaatgacttaagacttagtggggatgaaagcatagaaagaaagcatttgtatgacttgatttttacaacataatttatccctaataacaatagaaaaattacctagtaatgtaaagaatgaatcaaagttggaaaatactaagaaaacctggcattgcttacctgttttaactgttaccaaagaaaatcatagtttaatttttttaaaattacattttctgtgaagtatttaaaaggaagcctgacattagatttttcaaaagaaaaatttaaacttcttgtttagagaagttaattgtgatattcttgttaaggattttgaaaatgacatatttctatttatatgctttgtgcagtattattttcatagtattctcctctcttacgagttgacttcagtagatttcttcacaaatactttcagtaagcaattttggtaatgcttgacttggccacccaattttgcggagatgaaaacatcaccattagtatgtttacagtgtttaacgttcagagcaaaaaaaaaaaacgatgtttgtttacatacatgctgagtcatctctccttgtgaaattaaaatgtgtagtgaagcttcaacctcaggaagtcatatcagactcacagattttctgggatacgtttgttaccatgctgtttcagttagataatttccgagttttcttaatgtggatgtattctttggtttttttttttttcttgaaataggaagagacaactacaagttttaaagagacttctactacttgtcatcaagaacctgtaatcctaaagtaaaataataataataataaaatagaaaacattgaatcagatctactgtgtttaaaacagacttcctgtgtttgcttctctttcagataatgaattctgtgcttgccttttttcttcaactactttagataattgaagacgaaatgatagagaaggatagactatcaacaataacaaaaataataacataactaacatttattaaggatgtactaagtatcatattcttttttcaacaatttgtaatttttaaaaatatttttagagacagggtcttgttgtgttgcccagaaagtctccaactcctgatctcaagtgatcctcctgccttggcctcccaaagtgctggattacatgcatgagccaccgtatccagctacatattcttttttaagcaatatgcgtgcgtggattatctaaattagtctccacaccaatctcatggtgccaatactgttgtttgactgttttatagttgagcaatgaaatacagtcaggttaaataacttgccgtaggtcagtgagccagcatgtgctaggcctggattcattcaagaacagacagtctgactccacagcctgtgctccttatagtaggctctgctgctgctaatcagcaatttggtgtgacgtagctctagaatttatcaaattgagatattcttttttaaatatactgagcaatatttaaatataaatatggtggatatagcacaataaaaaatgaactcaacattaaaagcagttttctctactcctctttaatatgttatatcagttatttttggttagtcaaaatataaggataacctgatgttaaaaaataagaaaataactaggaatctcagaggtatttttgtgtttgtgaattctcctgactggaaatcactttggattatgttacacataatcgtttttctgacatattatcaaaagtcctgatataaaaatcttgtttcaatacctgcaataatttttcctaggaaatagttataaccagggaaagatccaggttttgtgggacctggaaaaatactcaatttggggccatctttaagaaaaatgataagaattatgaaaatgaaataggcagaaatgtgactatttattgagaatgagaacaagtcacaccaaaatataaattttaaaatgctctaagtactacagtgtcaaaatgtcacatgattcagaaaataaaatgatattcttattaactacctaacaacacagttatgctttttcccaatatttttggatagtctttgattatctcttcatatgcaaaatgtttttatattttctgtagaaaaaatagaatgacaattcagtctttcctgtagcatggttgattgaaatgtatgtgtgtgcatttgattattaccagtttagaaaaatatcttttagctttacaactgataattgataatgtatatgaatttatgagattgttttcaaatttgggcaaacctctatcataaagtttctctcatgcataggctgttagatttcagggaatttcaaggtttcctgagcagtgactagccctaaatactctgaacttatgagactcattaaccagtgtgtggttgacgagagagcatatttaatatttttcattatatttgttgatactaacatgttgtgtaaaatcagcagaaatttaaggttcttttcagcatgtctatatatagccctcttctttaattggattaccaaataaccaaagtgccttttaattatttttatttaaagaatatttttctcttaataaattcagcttttagtgtgatctgaaaacaaatttggtataatttatttctaaatgttagaataatttcttttgacttgatttcattactcatatttatgacatttaatatctgttaaattttttcctgaaatttcagttttctgaaaaaatgcatttaaatatgactaaaaaagttagcctttctacacaaacaaattaagagtttataatagctgtcttgctttaactggaatattctaaaatttcatttacagtggaatatttgagctttattatttcatttctgtcaataagataataaaaatacagtaccttttaaattatacatggttgtgtgaaagagtatattcctgataggagggaactgttttgacgagagggtcaatgaaaactacatctttgcagttttgctcgtttggtatttgaaggaattttcttcaggctaggttctggctctcaaactttgtttttcccactatacacatgcttctgtaaggcatattcatattactataagacctctggccatgtgccttcctgtcacagcactgatgagttcaccaagtgggtgtgaggagaattcctgggaaccatttccgcaatatgaagtgtgtgtttgtatgtgcgtgttggggagttgtataacagtaactcagtgatacatgcaggtgacttgtaaatcacgtaaaaatattctgtggcgcccaaactaagtgtttcctcaagtcagcttccccatagctgcgtgccttgccatgcctgtgttatgaggagcactgtgacagagagaagaacagagctgaatggaaggagacatgttttctgtggcttctttcatgcaacaccagcattaagaagttgcaggagagatcttatctctctcaaagccaaacatacttactatctggccatttgcagaacaagttgggtggtatctgctctatgcatgattaaaagcatgagttaaaagtaataggataggtctaaattattggcttgtaagtgtatctttggcatattgctagattttttttaaagtagcaattcaatatgcatagtaagaacatttagggacaccttccaatcctaaaatcattatgcatattgtaatctatagagacctaaggaaggtctatagagactaaaatctatagagactttaggaaggatgtaaaacagaatgctaacagtcactatttacggtagagaaatttaaagaatgttagtcttgtttattcactttttagtttgagcttatcacagcaagcatatattactattaaaatgtaaaactaactgttaaataaataaaaacaagaacaggtactgtaaagaagctacaacttaccattgtaaaaaccacagccaccctcgtctttcatccatccacccatcaccttctaattcacctactcatgcctgccttcatctcattgcttcttgcatctcaacctttcctcttggtatacttttcttcttgtttagtagatatttcagtgaaaagactttatgtttatatgtttctgaaaagactttccgtttgcccttactgttgggtgagaatttaacttactaatagaattttaggttagtggttatttcccctatacaatttgcaaccattaatccttgtcttttggcgtttgtcattttcccctcttctttctccccaataatatttaatattttctttctttctttttttttcgagacacagtcttgctccgtcacccaggctggggtagaatggtgcaatctcggctcactgcaacctccacctcccgggttcaagcgattctcctgcctcagccaccaaagtaactgggattacaggtgtgcgccaccatacccggctaatttttttgtatttttagtagagacggggtttcaccatgttggccaggctagtctcgaactcctgacctcgtgatccgcccaccttggcctcccaaagtgctgggattacaggtgtgagccatcgcgttcagccctaatattttcttttatctatgatattttgcattttccccatcctctgcctaggagtgaaaatattttcagttcttaaattttctgttaattcagtaaatttgtcagccatttcctcttcaggaaataccttatcaatatttctttctgctttcatttttggaattcttgttagctacttaatttactgtcttttaaattctcttatttcccatggattgatctttctatgttatttcttagatcagtttcaccatatcttcttttcagttcactttctctctggtttgttatttatccagtctactttgttagtgattacattttcattttcagatgtctatgtgattctgtttaatatacagctatgtctgattcatattcaccattttgttacataattcattagttttgctttatgaatttttttcatatttctgaatattttagaagatttcaaacatatactttataagctcagttttgtttacaaataagagaacctgaccaatagtggtaaaatcatgaggcttttcctattcgttaatgagaagcctggaggaaagcagaccagatttaagattccctgaggccatcaggtgcccagcctcctcttgttctttccctcgctacttcagggtgttggtgatttttcctcttatgcatcacaaaatgtctgtctcagttcttcccctgtcctcatatgagagtcgggttcaaagtagtaaggttattgtcaaaaaggattttgtctctgcaaccagagacgaaaacctccaattaggctccagtaaatcctccctcatatctctttgatcagagagctgagtcatggacacccccatccccaccaccaacacacacactcctggaccaatgattggcaagcaggaataggttaggtaatccagcgttaagccatgtgccaaggctgggcacccagtgcccagtggagcatggaggaaggggtgatgccctttgggcagcaaccaacaaagtctgccatgtccttatttttaaatgtttttcagaagattgtctttcatttgaatttccttggaggtgaattttcccagtgtactttgaattgttttgtttgcaattttatgtttctcttcttttcctttttcatcctgtttctttctcttacaagcacttctctttctatgatagttattggattggctccttctggccccatgttccgaagcagctcttaggttgctagtttgaggttacttttgaggtattagaatttattttttttaatgggaggtttagttcactgatgagaaaaaaatataaaatgcccaagataagcctctgaagctctggaaacagggtcacctcttaagagattttgaatttacattctgtaacttaagtccctcagtggattccccaactcccattcttgtttttcttctccaagtcccattctgtaacttaagtccctcagtggattccccaactcccattcttgttttcttctccaagtgccagaacatctatctatattcacttcgtaattctgaaatccaaaaactctaatcagaaaattaagttgttgagagaaaatggagtaggagtacatgtaaggccccatctccatattagacactgtagaagtttccagttgcctcagtcatgggccaggctattggagagaagggatatgcacataaatatatgggtatgagcacccaattaaaagtggtgcccaggttgggtgtggtggctcacgcctgtaatcccagcactttgggaggccgaggcaggtggatcatttgaggtcagtagttctagactaccatggccaatatggtgaaacccagtctctccaaaaaatacgaaaattagctgggcgtggtggcgggcgcctataatcccagctagttgggaggctgaggcaagagaatcacttcagcctgggaggcggaggttgcagtgagccgagattgcaccactgcactccagcctgggtgacagagtgagactccgtctcaaacaaacaaaagcagtggccaccatacattatcagttttgagaagaatgagcatattctatccttatgtggtggtgggaaaagactaagaaagaagaagggcactgcagtggccaggtcctccaccaagagtgataattgagtattagctccagctgtccaagctggcacctgcaatagcaacattagcatgacatccagttacactgctttaataattcctgaagaaccaattgtttaaccttggctgcagtgggccctgctgacattatttattttatatttctaattttattactttgctatttttgaaacggtgattttttactttataccttgagttgttttgacacaagctttgagtctcaagattttaaaacgccttttttgaagctccgtaatattgtgggtgaatggttgtcattaagaaagtgtttgaatatagcctcatatttcaatacgtgtgtcatgaaaaatacctctgctgccatcaccactccactcatattaaatggctcagacagattttgcatctcataatctcactgacttaaaagtagatgcatctcatatgagagccgaaaatttgcacagcaatattacacttaaatccagacattcacattttccccactgcagatatgcggtcttcttacaaagaaaaataactcagattttcttccttgtattttctttttttcttgctgactcacttgattttcagattttcgtagctttttttctgtttaaattacaacaatctacaatcaacaatgtgcatgagatgctaaactatgtgactttttcttattaagcaaacaaaaaaaatgagtgcgatagattctaaggtctttatcatggtctgaggctatagccacagcagaaaaatatttgtggccaagagttgcataaaatctatttatgtcagtgtgtggcttaacattctttagttgctgcccatcacccaagaataatttctaaacttctgatcacagtttaggaagcccattcaactagcccccaccagctctccaactgcccttccctgtacattcgcctgtgggtcccacttctgaagtccttcacatgctcaaacacactgggctcattgctgcttctatatttttttagtgttctttgctctctggaacctccttgtcctgctcacttttagtctgggaaattcctacattcctttcaggatagtgaaatgtcaccttatatgtgaaatccttcacactccaccctctccactcatacacatatgtgtctttcaccttcagtggcacataacttatttagggctaaggacctaggccttgttcacattagtgcctgatgtctccctaacagggtacctgagtagacagacatacccactaaatagtaaataggacagaaatagactgatttctaaggaccctgagtcaggactcatgctgtagcaaaaggctggctaagggaggttctgttgaccctcaagaaaactagggtaaaccagtgcccaaatcagtttgatgtgatctgaaggttagagcctacagttttggtgtgcataggcagccatagatatgtataatagaggcagacactcctatgggggcaagctgagggcatcatgtgggagccagacttggacagtataaaaatcccggttataaaaagctgactagagcgttaaaaattaacctttgtgcaaatgacattgtgcagcagcaagcaggtcagttgatcagcagtggatgacaaatcactggtctgcaggctttacaggagtatatctggaaagccccctccccataacctccttttgttaaactgatgaacacagtacccatcacagtggtgaccctcattgactgcattaagcttttacatgtgtgggtaaaagtggctactgtggtgtctccctgtgggatgatgaatgcatttcaggaagagtagtttcaccccattttcgtaaaactgttatgctttagacgtgtatatatgcaagttagtctacacacatgtttttctgtgctcccttagctgagaggacctagaagcaatgagcacctctagcatccagaacgtgatttctaataccattctccaataaaaggaaccaggctcctcggagaaatggcttattctccgttattgtccatgggtttgagctagcaatacacatcatcaacctagaacatcttgtactgccataaagtaaggatataatcaaacacaatgatggggacacatgtcaaagggacacaattaaaaagtgtcaattgcgaaatctcccagtggcaaagctgggacaatttgagcaatacgatacagtagtattggattatagccccaagtatgaaataaacatcgtaagtccatactaataaaaatatgtgattgaataaataaataaatgagggaaagtagacaaatttcccatgcagagtaatttcaaattatttatgtagcataactctccattccttaagcacattgcgagtacctctaaaaagtacagtatggaattggggagtaagcttatagtggagaagcctgcctaacactacctcagccaggtgatcaaattcaacaccagtagtgatgaaccatgtggacagtttatgtgatgatgagaatggcactttacatccatggtcttcttctcagaaacccataaccccagtataaccatgagaaaactctcacatgagtagcattttacaaaatacctgatgagtatttctcaaaactgtccaggtcatcaaaaataaagtctgagaaactgtagcagccttcggaagcctgaggagacatgaagactaaatgtaatgtgtgtcttggacaagatcctgaactaaaaaaggacattagacaaaaactgaggaaatctgaataaaagtacatactttagttaaaacaacaaacaaaaatggctccttaagaatggcaaagtctttttcaatcattccgatcttcaccaaagttcaatttgaatttgaagactggctgtacctcagtctttaagaaatgatgagtgaaccagtgtccagaattccttccattttcctaaatttcctgatttgttttgtttataaaatccccctctatatttcttccttttacatggtgctgaaaattttcaatccttttaagctggatgcgttaaactctgaaacagtgaacagataaggaacttaacttcttggaataaagtagcagtgctttaaagaaagaggaagaatttatgtaatgatcctttaaattgtgatgaaaatatggttgtttgataaatgatgtttttaacattcctcttagcaaaaaaaccatccaaatgacaatgataagaaaacattatttttcaattggtatattaggttagggaaaattaaatgcttgataaccccacttcacaccacttcagtttatttcaacacaggcagagttcaacacaggcctttctatttggatgtggatagtggttcatgagggtgactcagagacctagacattctctctctcatggcttagccattccctctggcctcggacttcttctttcccagccttctggatgcagggagcggcaggatggagtaaagttgagaggactgtaatggagatttttaatggccgagtctgtaggggatatttcactcctactcccatgtatatataaaactgaaatatagtactttgaataatagaaggaaactaatttttaaggaagcattatcctttcttagaatagcatctgtttttaactgcttacaagttctataactcaccaacagatgactaagagctaggactgacactggagttcaataaacaacacaaaattatcttaataggtttttattgttttgaaataaataagccttttaggaggtgattgtaggagatagatgttcatgaatcatagtctatcagcattttttgttgttgttacagtgaaaagcctttggttgttttagagataataatggtatgttagctgtcctctataaagaggatgttttgaaccttgtatatgttatttgccattttctgatggtaggaagaaatttgtgctcatccttttggtgcagttgtgactactgcatttttctgggaggtttgccagagttattcataaagacttgagcatatatacttacaaaggcaagtagcccatgtacaattttaaccagtcactttggagaggaaacagccacactaatcagctatttgtgatctagactcttgtaagagtctctcccacctcactccatctatttcttcccttctaagtaaatggtaatgagaattcattctgaaatgacatgagcctgcaatttgcatgaatttgatgtagaaaatcttatcatcatcacatggatcatagttcaattttatatatgtgctttccggattccaaatggagattgggaaaattattcaaattgttagaatatagacctgtaatctcaagtaattgatgtcccctattttaagaaagcatgcaacaaaattcagatgcatgtgtacagtctataaatattatttttaggtgagaagttgaatttttcatgattgtaaatggaagaaaaagaaaatcagtttaggtcaaaatacataaaatggcttggatattaatttcaccatatttttactttgtttcaaatattatagtaaaattatcagagctttgccactgaaccaatctgtctcagactcatactgagtagtagctctgtaacttgacttaaatcatttgcgaaagaattcttgagtcatatggaagacatctctctctctctctcccccgtacagtctctctctttcccccatgctctctttccccttgcccacttctctttccctccctgttttctatactttccttctactactttgcaggggaacttccccattttctttttcatagcaaatatgagagaaactctgggcaaatccagtttaaaaaaagaaaagattatccctgatttctgagggaggatagacagttttaaagagaatcaagaaagagattggggattcagctggatatgaaaatagctatattcattaagaagagcaatgcaaacagctgtaaatttggataataagcaaggaaagatatttgaatttcattaggcttttttttttgtctacagttagcaaatagctcaccttctaaatttacttcagttgtgattcacccacaataagcatgtaattaaaattgaagaatgtttaccaggtgagggaagttgatgacagaagcctggagaaaggtttggaaaatatgaaaagaagggcaattcaggaagcactctgcaatttggaagatattttaggaaaggtaatgccggggaggactgcaatcaaatagatgttgctggttcaagactggcctgtagaagctcagtcaccagcatctttttggtggtgggagtgaattaattagttaattcaatcaatattgattgaaaatatattgtgctttgacttctgcaccagattctgtgagaataattgaggggaataccatttctgtaatcataaagcttacaccctagaaagggagatagaaataaaacataattaagatcagttctggtgagaagtgtagagtactgtgagcagaactgtgtgggtatgtgtgatgtaggggaagggatttctgccccagtctgggcatgggctcagcaatgtatcccttgttcttgtctccggagccaggtatgcaaataattatggcagagcatactttttgctcttagtggcaatttgtgatactgcgttgagagcatagtaggagtctccattttattatagatgtgtcatggaaggcacacaaaagacatagaaaccaagtccagaaggattggcatgagtgtgcaaattgatgtatttggggagatttttccataattttttgaataaaatctcaaaagataggaaagaactttaagtacttcagtgttactggatcctaatattggtgaagggatattataaaatgagatacacaggaaaaaagagggactgaccaaaaggaacacattttataatgtgatagagactcaatttttgatgaattaatggtgatatgataattgctataattgagaactggaagattatggctcttaatagtttaaaatgaagtacttacatgtctctacaaaaagtataaatgtttgagagtgtagagtcatattagggggctgggaaatcaatattctgaagtccagtgaacaatggtagaatataatagaaaagggcatctgaaaaaatagatactatgaaacttttgtttcagttttatagctacatgtttgtatgcctcgcatgcagataaaacatggaaattgtatttcttactgtgggttggagttaaagaagcctgaaagtcgctgtggtggaagcatccagtttctcaggtgtgtttacatgctgaggagaggggcctggagaagcagcaaaaagaccaggaactagacagactccaggctcttgctcctgagcctaaagaaagaatcatctgcatcagggcccagtgacaaaaagagtgaaaacactgatactttgcctttggtcccaaggtgacaacaatcataaacctgccagttacctccttggtgttgtgatatagataaattgagaataatgtttagctcaaggtaggtatttgccctttgtaaatagttgatgagttaaatgtccagctacagaaacttctctttggccctctggcagggtttggagatttctgggcttcttggagcaggtctgtatttttttctggtccagcctgggggaatgagggaatgggtggttgtaggtgtgtgttaggagggacgtttgaccattttctacttcatctattttgattaaatggtgggaaaacaaatctcctgtgggagctacatcatcttttatgtctgctaaccagaagttgaatcctaggaatcagttcctcaagcagcattttaatagaacacagcaagtggccttctgaggtggtcctgatatcaactgtgatacaatgtgctctgttcttagatgcagaaggcacaaccagggagcagtggtcccagaacagaggcttcaggcaaggcttttcaggataagggatgtgtgattttgatgttgaaccctaattacaggttagccaggaaacaggaccactgggtggggaagtgagaggggtatgtttttgagaaaaataaccaagtttgtaccattagcctgaaatttcaccgttccgttcaccaaactctgatagtaaagcctttccaaacttcttgaacttgctctgtgcaaatttaaccaatcctgtgcatatgtagttctttttctcaaaaacacactaggaatggcaagatggttagagtgtgtgtgtgtgcatgtatgtgtatgtgcgtgtgtgtgtgtatgtgtgtgtgtgtgtgtgtgtgtgtgtgtgtgtgtgtcgagtccagaagacatgggaaaggtgtgggaaatgaatatgaatctggaaagctaaacagggctggctaaacagccttgtgtgagaggaggaattgctgaagggttttaggtagcgagacaacatgcgttatattttagaatggttgctgtggagctggtgtggtgggttatcttggaggggtctgagatgagggcagggagattggaacatagaaactaataaaataaacaattttcccgtaatgcttatggaaatattatagcaataaaatttaaaatatttaataatttttgctgaggtcctgagcatcgattgtgactctgataaagaagtataattagattcaggtttctaagattgcctgtccctaggtctcatttcctaaatgactgcttctcttcaagacagcttctgaagccaaaagctttatgggcgacagctctgggaatgcgttttagcgttatcatcttgtgagatcaccacccaaacatgaaggcaagtgccacagacttgcctctaaagatgtagatggttttgccatcaaatagagaatgtgttgtgtcaaagaaccaggtttcttccaactctaaaagcctatgcttcttcagttatttctattttgctataaaccataaaacaagttacagtacgaatccagggagtgaagaagctcccagagctgtttgaaatgtgccatggaggggttggcatccatgttctcagagctactttaagggaagtttgtgggttgattgtcatcctgtaaatacccagcagagtgctgcctgctgcctccccctcatagcagatttcctgtcctgcgtgacagatccggtagaacgcataaagtgcaacttcactatttcaggccccattataccataactgaaaatacaacacaaattcaattctgtctttataaacatatggtctatctcccgtgtaatatcatggtacatctctattaaatcttgctttctgttgttgatattaaaatggaattctactatagtgtacttttacagttgatcttttgtgcttcaaatgatttagaaatcttttgcataagtaaatcctggttccaaaatattcaattgatgatttattcttggagcctatttttaatttatttagtgtatgactacactttatgaaagggttaacattatttgttcaaggtttttgatatttgatgccttaaaagtatacttttcaaaacagacattttatttaagaagggaaatatactgttctttgaatagccttgacactgtgccagctcataagtgttgtaatgtggaatgatgaattctttgcatatatattctttgaatatatatttttatagtgtacacataagtatagatagtccatttattttaaaaagcatgttcatgattttaagtcattcttgagaaagtgttgtggaaattagttggtattttgacctaggtttttcctattccagaaacgtgttttttaaacactcacattaaaaaattggtgaggttggccaggcatggtggctcacgcctgtaatctcagcactttgggagaccgaggtgggcagatcacttgaggtcagtagtttcagaccatcctggccaatatgatgaaactccatctctactaaaaatacgaaaaattagccaggtgtggtggcgggcacctgtaatcctagctgctcaggaggcttaggcaggagaatcgcctgaacctgggaggtggaggttgcagtgaaccgaggtagagccactgcactccagcctgggcaacagaatgagactgtcaaaaaaaaaaaaaaattgttgaatttgcttcaatatccggttgtcaactgtagaacaacgaaattttttcattataaaaatcttacaggataggtaagtatttgtgcttttaaagaattaataacatttaaatgtgcagtcctaactgaattattttttgctccatagaagcagttcagatgattcctgctgatttctaatttcaaccataaatatcacttaatttgttgttaaagtatttttccttaatggaatttttctcctatagctttaagacagcctctgacttgcaatttctttattaattttattttcttaaggtcacattattcctggcattttagacatttttcacgatctgtgactcttgtctcatgggcagaagctttgtcctctttcctttttcttcaccactctttgcagccctgaccctttagttaatttttcagaaaccttagcaactctgcctttggagtggcactgtacactgtggaggacaaaatataaattgatgtaagctgattaatgatttagctctactgctgaaaattccacatttgtttcctgttgtaccaagaataaaatctatgtctttcctaggacttttgagacctcctgtctccttccccactctccacttccgtcccttccccttattgcttcccctatgccagccatattggccctcgtgtggtttcccaaatattgtgagaatcatttttctcgaagtttttatcagcaagataaattgctgggagttgaatttctaagttaaaagatatgaaaataaatgttttaatggttaatataaaattgcctttgaaaggtactgacctatcttcaaagcacctgtttataaagaatataaagaagaataaagagtatctgtttcccaaacctgtaatgaagctctttcaggctttttgatcttggccacatattggccatctttttttaacataagtaggacctagctttgagtggattaattattttaaaaattctgagcagttaaacctttgccatcgtggtcccaaacactgctctctagaggtggtgctggttctggtgattagtaggcctaggatgtggttatgggaatgtgtggctgagatggagcaaaggaaaggtcagacaggttggggggtcagatgttcagacacaaggatgctgagatcatcaggaataacaccagaagtaggtggggtaaggaagagtgggagccaggtgccacaggcattatgatctcagtgtctcgatagatgggagagggaggaaaggatgctgaagggaagctcagtgagcagctgtctgtatgggtatattaatgactttttttaattttctgaattttgtgatatcttggcatctttgtgccttgctgaacctggagaggctgtccctccagagctagcagattcccaaatgtatcaaacaacttgcctgggagcacacttttcacttgcaaaccaacaaatccaaagcccatatcctagtcaaagcagccagctcctttctttaactctcttacaccctaagccaatatttcccctgccctgtatcatcctagggctaggtatcagacaaccaaggatcacctctacagctcagagcatgctgaaagtattcagattgtccagtcttaaccttgctcacacttaacgtaccctgctttattcattccttcctgccgtaccacaatatagaccctgggacctgctctccccttgccacctccttcactcacccaggtgcttccccaagtggcactgtaaggcatggcatagcatgccccctcctgttggggactgtgagtcacagatttcctaactatgagtaacagaacttcttttaatggcactgacgtctttgtgttgttactcagtcacctctatgaattaaattccaagaacatttaaaacagtgggagaccatcagagaattgggcaggaaaattaaatattaatagtctatgatgtagctatatttatacacagaaacacacattgacattgaaatctgatttacgtaaaagagaccaaaaaaatgggttatttaaaacagtatgtacactggtcccaattataaagaaaaactttcagtatacataatgtaagacacagaaacaaatagtccagcataaaatacccaaagtgctaaaagaagaatttgggataactttgtttatttgtatttaaaaattatcttccaagtattgtgaattattttgtgtaattccaagtcttgctgtaacgtggtgtcatttatgtatcttttgctcctttggacattagaaccttgattgcgatggtgacgtaggagccatcaattccagacacacacattaaacaatgctatatgggtgggcctacaaattatttctacaaccaacacagacgttttttggaaatggctgagtttgtgctctaaactgagaataatgtacattttattgtatgcatacatagataaggtatgaaaagtctatagtatatttagataacaatttccacttcttcactgaaagctggttgaaacccttcgttgtgaagtctatcttcctgagttcttttctcattgatcacaggatcctgttttatgtgccccctggcagatttttttttttctgttgcatttattttatcaggtcctagagtttctcaagtatatttgctcagcatttcctctaagcacagtcattgtagaggctttcctttcctctgtgtgctgtgctcataatgttgaacgccttatgtggtaactcttgattttccttttatctgtctgttgaatcaaatagttgtctacttgggtgtgtagtcctgtatgtaatctctctgccagagatttgctctgtagaatcagtgctctctgtatacccaactgaggaatattttacactcatttcgtatgtgaggatcattcatacttggggcccacgctgaaagaactttgacactgcccagtgtcaacaaaccactacgcgtctcccagatagcagtaccttagtatttattgtttgctgaatagccagggggttgttacatactcattgtcatatgtatatgtaacatacacattttagacggaggagctgggggcatgtctttcttgaatgtttaggagaattttaggtggttttgttctacacatgtacaagaaatgctaactctcagtatacaaaaaaggattgaataaactggaataatatttgcaacacgaagtttagagcacccagtgccttcctcttatcaccatgtgtactttctaaagcagaaaaaaagtacgtagttaaaatctgaaaagctgaagtgccatttgattattttctaaaggaccaaaccacttgctccttcaccccactgccttactgaagcatgcctcaccctagcttttgtggttattagtattgtaagctctggataaaaataacagttctaggtgaattatgactttttggacttatggtttattcctctgaggatatatttgttttatattccttaaattgttctataaaggcaattcacatattttaaaatccctgtaattttcatatattttagcagactgtgtgtttaagggtatatatttcttgattgtgaaacagtcgcagtggttttagatgtgtatcttttgtctttctttcaaatccaaattccgtagtgaggctaatttagttcattccaataaaatattttaaggtctttttattaaagcagaaattaaaataattatcattatttataaatactgcttaacataaaaagaactccaaagaaattataaccactttgtaaaattgaaagtaaaaagcacttaaaattcatgagtataaaataaaatattcctcgataaaaattgtgtgcatagacaacttgtattttagaacagaacttggaatattcagtttgtctaaataaactcctaaccagaaaattttaatgaaaaaaaatcctctaaagtaacaataaatatatttcttctgtttatcgacaaatagctaatgaggatcaataatgtttttatagtgcgatgcttctagattgccatttacctatgctaataaatctaccagacctacagtttccatggtagtaggtataatgtaaaaaacaattcacgtggcccaaggcccaagttatgttatgggttattatattgatggtgagtagtatttctcagtaggatcactgttggtattttgagtgagaatatccgttgttatgtgggactttaacattgcactccattaaacaatgctggccttttaattacttcacaatgattggggcatccaaaatggcccctggaaaatattatgtgagtaatacagcccctacctgaaatccactgatacagaataggaaccagcacaatttttctgtagaggtggataataaatatttcatatgtgtgggccatacagtctctgtctcaattactcaactcggctattgtggtgaaagagcaactagagtatagatggcatgaaaaagagtagctgtgttccaatacagactatatttacaaaagcaagtgctgggcagattttcactggggggctgtagtttgccagccccttcaaaagtaccacaagtccatcagtctgaacacaaagaatgctatttgaaaaacaatcagtcgtattatgttagttaggagggtttggggctgcaaataatatgaaatcatatttcctgtttctaaagatagggttgtttcagtcttgattaatttaatgtatgattatcataagagacataagcgctttccatccttctactctgttattctcagttgttattatctcccctcatagtcacagatagatgcaacagtgtcatgcctagttacaacagtgcacaggggagaaggacatgtccatatagtccaggaaaacctttcccagaagtccccagctgagttgctatcacatcttgtttggctgcatctccaaacttgagttaaaaaatagaaaaaggaaaatatcccacatattttacataggataattatgattctcctccttagcctggagagacagattcagccttaacccatacctgtagatgaccaatatttgaatgagctgtgattacacgggtaagaaagagcaggggcctttgagaggtgagtgaagaaagatgtctgtgagatgcattgttttccatgttaactaaattacactcaaatgtaattctgtcttagacggtatttgagtccatttgtttccctctgtttcccagctagtcaaaggaagcgtttcattccacctatctttggtcagaggagagggaggagtgtagaccagcattctacccactgacgacaggtcatctgtctctattattgaagaaccattgcagagcctatgctcaccttctgcgaggtcagtaaaaccagtatatggaagagtgtttggacttgcttaacaaacatcactcagcagtccttaaggaacctctcaaataagccctagctaatcataaatagttagtatagaatttgatttataagagttgaaaataatttgctgaaaagcattttcactgaaatgatgtaatcattttagtgctaaagggaatacagaagaccaatggattcttttaagctcataaagttgctgccctacaatttcagatgaagcaggtgatttatcaagagaataattttggtggctgagaggtacagatataactagaagctggttttcccactttgttgtgctgtgttccctgaattacatcatggtattcctgcagcaaaatggctgcaagagaccttatgcttatcagtagggatggctctgactcaagttctgattttttttcctggagctattcctgaatgttgagctctttaagctgtcagtactggggttgaacaaatacctttagatgcaactctatttattgtagtgacttttggagaatgatcctgtactattttgtggataggtttgttcaggagaccttgttttgcatctccctcatgtaattggttcaatttcgaaggggctgctcctttaacgccaatcatttacttatgtgtctattcaaacatatcgaattcactgttccatcctcaaggttctaagtattctagtgtgaaagagaatgagccgaacaattaaagtagagtgagatttatggcacagtcgagggaagcattatgtcctcttaagatcgagggtgacactgaacaggtcaagaagtgatgcctgagttgagtctcaaaacataaccaaagtaagtcaagtaaggaaaacagggatgaagctggcctatggaaggaatgacacaagaaaaggcttagaaggaatgacacaagaaaagtcttagaggaatgggagaatatgggatgtctggagaacagctagcagttcactaggtctagagttcacaaagacttaagatgcacaattggcaaatactgagtaatgggactgtgctgggggagagttaatatatttagaactttattcttaggcagtgggagtcatcagaggctattcgatgggacagtgacatgatgtcattcatatttgcgaaaaccattatggctgtgggataaagaagggatcagagggggtaagattgaaggcaacatgaccagccaagagggtctttcaataatctaataaagaaatgccaagagccttgattaaggcagcggtggtggagagagaaagaagagatggttgtcaatcaggtgctgatagaatttattagacttgaactttttattgtaggaggtaagagaaaggaaaggaattcgagaccatcccggctaacacggtgaaaccccgtctctactaaaaaatacaaaaaattagccgggcgcggtggtgggcgcctgtagtcccagctactcgggaggctgaggcaggagaatggcgtgaacccgggaggtggagcttgcagtgagccgagatcgtgccactgcactccagcctgggtggcagagctagcagagctggactccgtcacagaaaaaagaaaaaaaaaagtgactactgcatttctgacagggcttgatacatgatagttcttcttcttcttttttttttgagatggagtttcactcttgtcgcccagactggagtgtagtggtgtgatctcggctcattgcaacctctgcctcccaggctcaagcaattttcctgcctcaccctcccaagtagctgggattacaggcgcccgccaccactcccgggtaatttttgtatttttagtagagacggggtttcaacatgttggccaaactggtctctaactactgacctcaggtgatctgcctgcctcggcctccctaagtgctgggattacaggcatgagccaccgtgcccggccaatacataatagttctattcattgacatatgaccataggagttggaccaatgttgtggaaagatgagttcacttttaagcctgttcattttgaagtgcttggaaacctagtaactcgttgtatataggaggctggaaaccaggaaggagcgctgaactaaagaaatagatgtggggggccgggtgcggtggctcacgcctgtcatcccagcactttgggaggctgaggcaggcggatcacgaggtcaggagatctagaccatcctggctaacacggtgaaaccccatctctactaaaaatacaaaaaaaaaaaaaaattagccgggcgtggtggcgggcacctgtagtcccagctactcaggaggctgaggcaggagaatggcgtggacccgggagatggagcttgcagtgagccgagatcgcgccactgcactccagcctgggcaacagagtgagactctgtctcaaaaaaaaaaaaaaaaaaaaaaaaaaaaaaggaagaaaaagaaaagaaatagatgtgggagttttcagcataaagtaagacactgacatgaatgagaccacacgggcactagagcagacagagatgagacacagtgatggagtccaaagcagaaccatgaagggcatgggtctagaagaagagggtacaaagacgactaagaataagatgttgagagggtacaagaagaccaggagagtatagtattctattcttgaaacaaaagaaacaacaacattgccaaatatttctgtgtgatgaaataagatttttaaagaggaccctgggtatgttgaaatgatttacttattgatttttatttagataaggaatgtgtgatcattatgtaactagaatatatataaatgtataaggtgaaaaatatatataattttgaataattttgaataatttaagaatcaccctaaatcccaccacccagcataactactgttaaaattttgatgcatatctttccagactttttctatatgcaaatatattctctatatccagatatatgtctatatataacaaaatgagttcatactataaaaatattggatgctgcataaatttgcttgtcattcttccccgagaccatgataatcttctccacatctttctaattttagtatataagctgggaaatcacatgatgtccattgaattaagtaactagaagatcatttgtaattttgcaaggctaatttcagtggaatggtgagggcagaagccagattgttgtgggatggggaatgagtaggtagtgaggaagtggaacaggcattatagactaccttttcaagaagctaggctgtgaaggagaagggaagtatagaatgtcaagtgaggagtaggatggtgaaggatatatatattttttattttgtattttacttttttaattggacaatactttccactgcctggaaagagccagaaaaggggtgaaattgaggatacagaagagagagtacagttgatggagtgaggcctcagtcaggaggcaggaagggatgggatgcaggaaagaagaaccaagccccatcttctaataaggcaattgggaaggagttaagggtagaaacagatagtttcatacatttgtagatgtgtcacctgaggtgattctggtcaccttagaatgattatggctgatgcccacatgtattgagctatttgatggttttttgaactttcaggaaacaaagaccttccatattggattagatccattatctgttcacttttatcttcagagtggtatcgagagatgcatgctagaaaggtctagtcttctctgacaaactgaaaggtcaaaaatggcccctaaacactcagttatcttaaacaataccttaaggatttattatccacatatttctgtgaagtttcttaaagttgtgtattttcttagcctgttctgccccaccagacttaccacccgtgaaataacatattgaacacatttcaggaagttgaattttatcttggaaaaaaacagatttggaacaaactttggttgaattccattaaccttggaaaagcaagctttagttctcttatgggtaaaattgggataccatcactattgacctgacagcagtgtgaatgtagcataaggtaacataggtcaagtgcctgaacagtaactgctgagacagcgtgctcagcatgtgttagtgccttcctccatgactgtctgatacacatgttgttactctcagtgattgaccaaggactcccattcactccagcataccaggacttgatgatagcaacatgaaactattgctaattataataaacttcggccaatgacctgtagtgttcagtggaatcattgttgttttgaaatgtaaatatcatgaaattaatggaaaggattatactatcttgagatgtacaaaattaacaggcctcatttgcatttcctaaagccatgtagattcatttttttatatttacagaagcatattacctgaggtattttttggctcataaatacaaaattaaatcccacagatgaccagaaggaaagctaggtcattgtttctcttttttacatatgattttctgtatcaaaagcttaataagatgatttactaaggagtatatatgctgaacacaactcgtgctgaaatgtcagtcctcactgtgaaagacttctaggcaaatataattgctgtaatgtgttacgacctttcaagactcataattcaattgaaaggggcaaggctaattaaatgcaggagaatcatttcccacttactgtagctgccactggatgcaaagcagtacctgtttactttagatccagtgaatcagccagtctatgacacaggaaactgcatgaggcaggtctattaggcttaaataatttccctatgagtttctgctacttaattcctttttaactcaccagcacatgtgtagatttaacttcgacttttaaaataaaatataataattcactagagcttgcttgctttaaaaatacaagtccttaggtactaattaagtatttttataaccacttaactgttgaaaatagctcttaaatatctgcatttctttctttatatcatgattactttgtctccttgactctccatcctagagttacttggatgccttttcatagcctcggttaatttgtttcctgcattttttctggcagcaattcaaaagatcattgattattttcccattactctgttgcacaaactacttaatatggctccatcaaggcattcaaaattcggagctgccattggttacctgggtactgcctgatctaaatgccaagttgaaatgaaatgatttaatggtcccagagatgcccatctccagcagagctcactctgtgagggctgccctcttggtgaatggttcctgcttttacaatctgatgagtcagaacaaagctcatctctctaatcaatattaagcatgtctaattcactttaatgtttaccacatcacctaactggagcttgcacacaatgggtagttagtatataggcattgaatgaatgatggatggataactgaatgaaggaagagacagaaaacttttatttaacaatgcattatgggattgcactttttggctagaatatcaaaggctttcaaggaaataattgagaagcattagattcttgcattaacagtaaaatttatttatataaattatttgaaaacactgtaattaaatttgagtttctaatgcattctggacataagtcctcattaaaagtttttttttcgtttaaaattggttgtctaacttttaagtaaagatatcttaatatgaaaattactttaaaaattaacttttatgacttggttataatttgagggttttcaatgccttgttgaatgggattcaaattatattgtggtaactattgtaggaaatttgggttgggttcaaaaggattagttttagtataactcaaatgactctagtaacaaaataaaagctacattttaaagagagaatatcgaaggcattctgaagaacacttatttttccaggtctgtagcagctaaagtggtgcattcagtaaaaaatctccttcctgcatcagaacatttgtattttattttaactataattgtgtgtgtgtgtgtgtgtgtgtgtgtgtgaagagagagagagagaaacttgaacgtggcaaagaatcaagcccatgagtactcatagcattttgagtaacgcccaacactgctaatcattgtgaaagtgaagatctctgttcctgaatgcattagaaggcacaaaacttaggtaaatcaaatagataacaacacaggcaacttgtattcaaatcatgtatttgaattagaattgacttaaagtcgttctaaataccagtggaattcagagaaaagaaaagtcactagggcttgtgtaaacagggagacttcctaaagaggttgggacctgagagggtcttgaagacaaaatggaatttgagtcagtgagaaggaagacttcctaggaggcattgtgggctaacctgcacagcttgaactatactttgcacaaagttactcatgtggaaatcagaactgaatcaaatatcactagtcttaaagttactttttcctgaacaaaaatggggtacaatttaacacatgttaaataagctagtatcctgttctaatatgtactatacatttttctgaaatacataaataaaagtaaacctgaagtataaattacgttctctaaataataccaagatgtcatgtgttttcagggtctggggaagtactgaacaaagaatatgtctaagaatatgtctaaaaatatttctgaaagatattttaaaagctattattctctaggaaatagacccacaattgaaaagataaagaattgatacttgaaaagtacaaataaatatttggatatttcatatgttcacatttaatcaacaacatttaggaagggcctaactctctactatatgctgcagatgacagaaaataaatgaaaaactgaatttatgtcttaatgagtttataacctggtgggttatgtcaaactaatgtcaatttcttaatgagccagttaagaaaaatgttaagatcttctgttactgactgtaaatacagtcttgattcagggattatgaaggtgcaggttaaggatgtcagtatttggatattggaggatgagaaggaatgtgtcccaggtagaaactttaggaagaggcatgaaccatgtgttgtaatgttataccctgatcggagtagaagacttttgttaaagaaataagatccaatagagcagggtcagaaagtggaatatctgcctggttacaaagagaagttggggcttgttggaaaagagaattaagcagttgttttggttttctagaaaagcaatgtttaggataattagtttgggctaaattttacagtgagactaaaggaaggcagtttggtggctagtttgctataatctaaatatgaaatgttgagattctggtgaagaattgagatatatagttattgcacaagaaattctaatttataggcagaagaacaaagaataaattaattgccaaagaagctatgttcctattaaataatttaaagttacttttggactgtaaagataattcctcaagatatgttacctggcatactaacagttctgattttcagttgttggaatctactgtccaaatctgaattgcggtgttgctgaaggataataagcaagttgaacaatgttaacctttggtcaagaaatttcatttagacaatttgggtccctggtgggacactggacacctcacatggcatatagagtaagcactacttacctgaatatcacataggttgatactcaagtggaaaacaacccataatttaggagtagactgagtctgtatatgtttccaaaatgaattaaaatgataagactgtgaatgcagtgaaaagcaaggaaatgaatttgacagatactaaattttattttcaatttcaaattactggctttctattagcatactccaggagtggtgaatttctataaaattggcacggagtattaaattttatgagtgtgctattgtaagtataaaaacccatttcagtgagatatggacatggttatttctttttactcagcaaactctaggccatgtattattagtcttaacttatcaccttgaaagacttgaggctttggagctttctttgtatatatatttgtggtaacattttgtttatttgggtagaagaaaaaggagattctgaaaagggtatactagtttgataagtttattaaagcattctttaatatgcatttatgctttgacattgagtattattacagtaatattttcaaattattacaatgatatttttgttcagcagcacttctttgagtgttttgttaaaaggtgtggctttaccaaaaatagaagtcttgcaaatattgtaatatttgaggaaagtacttaactacactttagcaatagcggagatacccgcaccccaccctgccttcactgcaaatagcaaaaactacttagacattgcatatcactgcaattttgaataaaaggggtgacagatcctgtaattacagcagcagcttacatcttggatcccctctcagttcactgagccagggctttgaatggttattgtgtaaagaatagtgatgggtgatacactacctcgttatagtcaaagttaggggaaatgggcttagattgagcagagttaatggaggaagataagaagcagggctttcccatagtttgggcaccagaccaggcaattttcatacacatggtagcaccaggaagagtgacaaatgccatcttcctcccacctccatttggacatggtgttgtcatggcagagtgtattctggtgggagccaggatgccttttactctctagggctatgtagataataatacaaaagatttctcctgttttttttttttccctcaacttctgctcctatctgtgatacatacacacagatactctcttcagcgccagaaaatagcccctcttacaatagggtatccacatcctagaggtactttaaaaaaaaaattaacaggccgggcacggtggctatgcctgtaatcccagcacttggggaggccaaggcaggcagatcacaaggtcaagagattgagaccatcctggccaacacagtgaaaccctgcctctactaaaaatacaaaaattagctgggcatggtggcacacgcctgtagtccaagctactcgggaggctgaggcaggagaatcgcttgaactggggaggcgggggttgcagtgagcctagatcgtgccgcttcactccagcctggcaacagagcaaggctccgtctcaaaaaaaaaattaacagaaaattagaaccactatcatagttcagataacatatttggaagacttagttttatggtccccaaataaagaggtattgttcttactggtcatctggtctgagcagagatatcccatataactactcccccactggcatgtgtggtgatggttcctgattacaacagtggttcttaaagtgtcgttcctgaaccagcagcagcagcagcctctggaaatttgtcacaaatgaaaattatccaacccaccctagacctaatcaatcagaaactcttggggtgggtcccggaatttgtgtgttagcatggcctctaggtgattgtcatggacacacaaatctgagaactatttgtatttgttttctattgctgcagtaaaaaagttaccacaaacttagtatgtggtaacttaccattgtattaccacttagtttttgaaggtcagaagttcaggcagacatggctgggtctccttctttggctctctcaaggctgaaatcaaggtattgatagggctgtgtcttactggaggctctggggaagaatccacttctcacctcatttaggctggtgactgaattcagttccaggtggttgtggaactgagacctccatttctttgctgactttcagctagaactcattcagctcccagaggccacccacattcttttccatgctttttatgtggcccctctagcaactaggttaagtttttctcaattcaaatccctctgccttttcccttagccctacccgtcttacatcctcttctgctgtatctctatcatgttctcttccaccgatagccaggagaaagatctgatttttgttttgttttgttttgttttgagatggagtctctccctgtcacccaggctggagcgcagtggcataatctcggctcactgcaacctctgcctaccgggttcaaacaattctcctgcctcagcctcccgagtagctgggatcacaggtggccaccaccacacctagctaatttttttgtatctttagtagagatggggtttcaacatgttggccaggctggtctcgaactcctgaccttgtgatcctcccagctcggtctcccaaagtgctgggattacaggcgtaagccaccgtgcctggccaaaagatctgctttttaaggggtcatgtgattacattggttctacccagataattcgggataatttcccttttttaaaggccaccgattggtaaccttaatcacatctgtaaaatccccttgatcatgtaatgtaagatatttacaagcataacacaagggggctgaggtcactgggccaaaattttgtctactttgcattacatctcacaggttccttctcttgactttgccaggcccctgtgttgctcactagctggcccagctttacagccagcatcctactctcaccatataagaccaatggcaacttggggaaactgacctcaagacctgctctgtctcaccaggaaagcagccacattgcacatgagccccacgcatgcattagaacacctgctgttggtgtctccctcatctagtctaacattcctttatatctctctcttgcctgttcctctctcattctccagaaatggctggctcctctttttttcatttgtgtccttacctctattgcctcccatgattcagaagctccagggtgtaactaagccttgggattcttctctaaaagccgtacgccagagtggttttgagcataaactttgaagtcaagacaatttaggttcaagttttgttttttgttttttgttttttttttgagatgaggttttactctaacatccagactggagtgcaatggcatgatctcggctcactgcagcctctgcctcctgggctcaggccatcttcccacctcagcctccggagtaggtaggactacaggtgcgtgccaccatgcctggctaatttttgtattttttgttgtagagatggggtttcatcatttttgcccagactagtctcaaacttctggactcaagcaatcttcccatctcagcctcccaaagtactgggattatagacgagagcaatcgcacccagctgaggttcaactttgatgaccatgagcaactttctctactgttttatactgcagttccctcatttataaacgggaggtaatagtaaaaggtcattaagccagtattattttattcatggaaaaagcaatttaatgtacaggagactcagtactaataatacctgccaactaccctaaataggggagaaatttaaagaaaataaatgcaaaaaaggcagagaaaaaagcaattcagggttttcagacttgattcttgaaatgctgaagaaatttagaaaattcaccttatctcatctctctccctttctcaatagatctgtttttgaggcatcttgtcttgtgagatttccagtggcatccctaccccaattggtgtcttgaagtttaggatgatactcatgtagacaacattgcaaagaagaaaaaccatcacttttgcatgtgcaattattctaccgattttcagaacaaatcttttaataatataatgttatcaccatccttgttttacaaacaatgaaaccgaagcttaggtaatataactgactcaacatcatacgtgcagaggtaggtgaattatctccacagctctatgataatgacaggcattatcagtcattagcttcttctgaatttgtatcaactaaagctagcctatcatataataaagcttcgtggagtttgatggcagtagtgcccagtattggtgaagaaaaaaattcatgaggagaatctgaagctggagttccatggagagaaaacaggtttgggtggtccccttggcaactggaaagcatcctgggctattgtgctgctatagaacagtagaaagaatggagataatttagaaaggtgaggcagagaattccaaagacattttccaggaaggtttgaaaaggagaatttctgcagtgaacgatgcattgtattaacatatctggcatttgaaggcattccttggggtatgggaactcgagtcagtttctccttatcaggacgctgtccaaggaaacaagccccttaacccttggctgcttcacagaggagcccattttactctgacttttcttttctgtcaggttttgtattttctatcatgagtgacaaatagctgatagcatcctggcctgtgcctctttcttaccaccacagaaagaatatgaaattatctgaagtattaccaggtgggctgtattattaccttacatggaaacacaatttaaaacttttctttctgtcttttttttttttttttttttttgagaaaggatctcattctgttgctcaggctggagtgcagtggcacaatcatgactcactgaagcctcgacatccctgggctcaagtgatcctcccacctcagcctcctcagtagctgggactacaatattgtgccaccatgctcacctaatttttgtattttttgtagatattggtctcactatgttgtccaggctggtctcaaacttctgggctcaagcagtccactcactgtggcctcccaaagtgctgagattacaggcatgagccactgtgcccagctaaaacttttcacgaagaaactctcctcagaaattcaaattctaggagctttctcataggcttgtaacattgtgctgtatggaagaagacaaacttgttgtcttttgttatttacaatcttgtttttcactctttgactgtatccagtctgtattctaagtctctctaccaaaggtaagtaaaatataaatttttactttgaattcaaatcagtgagaagaaatttatttgctttatgtaaattttcttttgtgggcaaacagacggtattaattgcacagatgggattgagactatatatcattttatcctcagaaagatgaagggctcgtgagactgcacacttgatctgttctcttgttttctcgtttgtgtcaatttggttgttccacatagaggagtgtaaatctggatctctattttaatgagtgtttacctgttacttcagagataaagaattgccaaaaaaggaaatttaaatttgggaaaataatgacaacataacaataataacaaatatttccaggaatgttagcatgctttctatccattaagttatttaatcctcacaataagcctataaaatccttattatcctgatttttcatttgaggaaactgggactcagaaagggcaggcaattgaacagtatcacagagctaataaattgcaaggcttcaagttttttttttcagtatacgttccttatttgtttattttcagtctttccctccagagtgtgatctctgccgagacagcagatatttttgctggttttgtccactgatgtagccctgctacctagaacaatgcctggcccagagtatatgataaatacttgaatggcagggcttcaatttaaacaaaagtctatttgataccattgtgttagctattgctgattaatagttaatggcaaaatctcagtggcatgcaacatacaacagcaggcatttacttcttgatcatgtgttgatggtttggttgggagttggctgactaggcttaacttagctgtgcttggctccagctccagctcggattcaggtgtgctccatgtgtccttctttcgttttggaccagtaggttatatgtgactcttatggcagaaggcagtagcacagaggagaagcccaattaagtaagcacattccaaatgtctactcacgtcatatttcttaacattcctctagccaaagctcaatagcaatggaataggaaaatattctcttctcatggaggtgaggatgggaaggaaatgactatttactgaaaaatcctccaatctacctcaaatgcctgtgcattttctctgtccttcctaattcataaatattgaatgtacaggcgggatgacattctcagttaggagtcaccttattgtgtgtgcttgtcagaggggccacataccaaatcatcaattcatattttctgactaccattgcctccctttttgctctagaggatgtttgactcattttgccttctctgccctaatttgttcatactagaactctggaggcaaagatcattaatgagtgattctagaagactatggttatgattactatcctggaacagaatcttttttttctgttttcatgcaattccaattggccaagggattttttaaggaaaatgttcctactacaaggtctaatacagacagcagaaagcaatccaatgttttacaagtagcaggacatgcaggatgggaatactttttctagaaacagcaaactgtaaagatgataccagctgaggtatcacaggcaggggagcttcttaccttcttctaccttgtgctcaatggctgatatgaagctaaaatgccccttagaggcaactcaaagggaatcttacatatcaacatcatgggtttagaggtggggattttgcggtccccaccaccactccttttgttcattgctaatgtggttagtaaactaaatggtgaaaagattatggggtagagacagaattcctggttttagtctcaactgtatcagaaacagcatggctggaaaacagcatttcacatttctatgacttatttttccacttcaacaaattagtaccgtgtaaccttttctttgctactgaattttacctttgtcacaagaaatgactaaaaagattgatcctcaaaggaataaattaatttgagtgatttgtctgggaactattgttcttttatttttagagttagaagggctctgtgaccttcaggactgaaggccctaactaacacttgcttcttggctcatagttggcttgagatctttgtttaaggagtatctttcacttctgcttgatgcatgctagattcatgtctctgttgtgacttccccagcatttttgtgtcatgttttaaaagttacataatggaacagctataattttatgtgccttccttgatctatcagcgtatgtctacaagcatgcccatgttataatggaaattctctatgcagtcttacccagtacctgtcactatcatgttacaatgaccatgactgagtatccagctttcctacagaacttccgtgttcatcatcattattatgccacttgtgattccattagagtttgaaaaaggttctcagggaacttctccagaaacttgcaacagctgtatcataagtactggactaagatcacttaggtaggtctggcttcagtagggatgaaggtatcccagtgtctgcaggaagcatctggcatctttatccttctatggcatgagaaggtgtgttgcccagcggcagaattctgtatatgacagagctgctctatggcagttggtagtgtgaatggaaaatgtgtaaagtgtttttaggtttttggaggacaggcagcatgtcggtgccaactattgttgtgatgaagaaacccaaatctaaatcggtctgtatggttggattgctatgcttagtttatttaaaacatggcatttggagagagttaaaataccagcacactgtgtctttgcctctactttttttctgaagcaaattggttgggtctatttgcaaaagctttagctgtaagagagccagtaaagaggcacatttctactagtgcctattgtgataggccttctttgtcgtgttaattctagtagaaataatcatctacattgatttataaggttggaattgaatggggacattgattcaaaataaaagaacagccatggacattttgatttatgttggtattaaggcaaatcattcagattcggtttgtacaatctaaggttgcttgtccagtggttagatgtcagaatgtatttagcaatttcttgatgaaagaaacaaacccctgatagaatgtatactttttcggggggggggggggaggggctagaactgtaattttttgcttgttgtgtggagactgctacctgcatgtcagtggttcttaggtaagagaggattgctttagagtgaaataaataaccttatcagtcactgattttatgggacaagaatgtaaatgtagtgagtaatcagagagcatgtaaatagtagcagataatttttcagaacattggcacttagtttgaagatgtctttcatatttaagagactgaaactcttgtcccaaggagtatgatattctcaggggtcagttatgatgtgaagaaaaaagtagccttttgttataaaggggttcctacatctagtaatcattggtggatttactttgcttcctgctattctttgttgttctctccagactgacattgatgccccttcctcacctctcccatagtcctctctgtgtttctttttttttttttaaatgtatttatttttattatacttcaagttttagggtacatgtgcacattgtgcaggttagttacatacatatacatgtgccacgctggtgtgctgcacccactaactcgtcatctagcattaggtgtatctcccaatgctatccctcccccctccccccaccccacaacagtccccagagtgtgatgttccccttcctgtgtccatatgatctcattgttcaattcccacctatgagtgagaatatgcggtgtgtggttttttgttcttgcaatagtttactgagaatgatgatttccaatttcatccatgtccctacacaggacatgaactcatcattttttatggctgcatagtattccatgttaaaaagtcaggaaacaacaggtgctggagaggatgtggagaaataggaacacttttacactgttggtgggactgtaaactagttcaaccattgtggaagtcagtgtggcgattcctcagggatctagaactctctgtgtttcttaatcacaacatgtgtcacactgagacctaattgttcccatatttggctatctctaactttaaacattaagctacttgaaagcaagactgaaacctttcgcagcatatagcagataggtatgcatactcattgttgagtaaatgaaatatttcagtggctattgggtcccaaaagcaggcctaaggtacaccagtatgctgaggaggcctcagtttttaatctgattccaacattgccacctcacagtgtactggtctggtttttccatctctaatttgaccaggttggaccagagaggctatcttccagtatgttctaagtttcagtgatttacccattttgaatcaccaaagttacaatttatttcaaagatgattatttctaactgattacatgtgttcccatagggagcatgacttcggcaacttcacctatcattctgaaatgggaccccaaaagtttggaaatccggacgctaacagtggaaaggctgttggagccacttgttacacaggtaagggatgctttgaaaccactttgttatatatgtgtttctattgtgattatatcctgactcttggaaaaacttagacatccttaaaagagaataaatcatgccatgattccgattactgaatatatattactgcctgaactatgggcaatctcattgccctataacatttgaagtggcttttaaaaactatttgtatgatttttgaaattaagttgatgagataattgaagaggggtccttggtgaagggggccctcatttacggtaatgggttcaaagtctaaataaactattcctcctgcactttcagatgctaatgcaccattaggaaaaactgtgttgactatacaacagcaatgtatatttattgaattacttttctttcagtttacaaagcagaattcatcctgttggagtgatgagatgttccatttttgtgttgtcacagttgtcacatttccacaagataacggtcaacagaaaaatatcatcaggatttttaagtgttataagttattttttagtgtcttgttaagcatgctctttgctattttaactctgagattcctgggatgtgattttttttttttttttaccaaattataatagaggcatttgtattgtcctgtggctgctataacaaattcctatctacttagtggcttgaagcagcacaaatttattattctagaggtcaaatatcctagtcaaggtattggttggcttgcattccttctggaagctctagaagaaaatccattttcttgcttttcccatcttctagaaaccacatcacttctttgacccctttctctatattcaaatccagcaatgtagcatcttcaaatttctcttgcactctgacctttgcttttgtccttgcatcccatctctgaaattgtctttcctacttccttccaataaggacccttgtgattatgttcggtccacccaaatactccagaaaaatcctcccatctcaagatccttaacccaatcacatccaaaaaggcttctattgccatttaaggtaacatatttacagtttccagggatttggatggagttgctttgaggaccattattcagtctgccatagtttgccctctggctccccaaagattcagatccttcctttatgcaaaacacattacaccacattctcaggtctccaaaagtctcaaccaatcatagcatcaactcaagttcaaaatatcatctaaatttcatcagcttaaaagtcccaaatctcattgtccaaattatttaaattagatatggctgaggatctctttataatctgtccttgagcagagttcctctccatctgtgtagctgtgaaactacaaaacaaattatatgttcccaaaatgcaatggagggacaggcataggataacagttacagacattcctacataaaaagggataaagtggaaggaaaaaggagttgccagtctcaagaaatgtagaaatctacatgggaaaattccattagatttcaaggcctgtgaataatcctctgtggcttgagtctgctctctgggcctagttcagaattatttcttcattttcatgaagggttgcacatattttcaaccaggtattcttgtcatccatctcctacctgtagaattttgagtgtccattcagccttcgtgcatttcatcccttttctgcctgtatcagtccaagctgatggtgttaccaccgttgtaggattctcaagaacattgtgattttactatgcacatctccaggattcactccattagaaaaacaggctcctctacagatctttcttggataatttcatctccatttttggcctctgttgaagtggctgaggggatccatgaattacatgcctaatcacttcaaagagccctcctttcacttggaccttttaatccttatatggcactaggaaaatgttatccagacataaaattggctttctcttcaagtatgctttcttgaaagcacgtctcctaattttagccttttgaagtcttcatacgttgagaattttcccaatcatcaagtcctggtttcttttggcttaatagttattccctttattcatctttttcctctcacatttcactataaacagcaagaagaaaccaggccactctttcaacactttgcttagaaatctcctcagctaaatatgtaagttcatcacttgtaattctgacttccacgtaattgtaggaatccgtccagctgagctttctgccactatgaaacaaagattctcttttctccggtttccaataacatgtttctcatttccttctgaggcctcaccagcatctcctttaatgtccacatttctaccaacgtctatttatggcaacttagatactccccaagaagttaatggttttctctaccatgctcctcacttccttctgagtctgcaccagcagagcctttaaccaaatctttatttttaataacagtctgttcaaggagatctataatttttgtattatgcttctcaaaattcttccagccttttctcattaccaattccaaagccactgtctacatttttaggtatttgttactagcagcgccccacttccaagtaccaaaatctgtgttagtttccaattgctgctataacaagttttcacaaatgtattagcttaatataaaacacatttattgtatagtcctgggggtgaaaagttctaagaccagtgtggctctagggaggcatctagttccttgcctgtttcagtgtctgcagtccacctgcatcccttgtttgtgtcaccttcttccattttagagccagtagcacaatgctccagatccctccgatttcagcttaaactgttatatttccttcgatgaatcttaactctactccttctctcttatgaagaagatccttgtgattacaatgggctcactcatatattccaggataatctctccatcttgacatccttaacctaagcacatctgcaaattcccttctgccatttaaggtagcacattcgcaaattccagggattagaatgtggacatctttgtatgtaattggagaacattttatgagattcatgcatatttttcattcagtcatgactcttgttagttctataaaaatttctgcaagaagcacctaatactgatatgcttacctaatactgataggaagtatgttggccacctactcagattgtaccctgtggcctagggttgattcatgaattttttatggtctgcagtaagaacaaaattgaggataaacacttgaaatttttataggaatttgacagtaattttttgtctgctgaacctaaatataaaatatggacttataattgtatatgtttaatttttaaaattattcatgatgttgtgttttataaaatattggtctgtgagatattggaataataaaaatgtagcctttcatcacagatagcttgagaaagactggcttaggagatatgttggagtcagaacaatctggtctaaaaggtacttctgccagatcagttaaaaagtgagtgaccttttcctagccttggagtttacacttaagagtacctataagtatatttaatccttatcatacagattaaatgaaagaaaatattagaatacagtacctggtataaaacaaacattgagtaaatgtagcttctgtttttcctgtttgatggctatatattcaggctcatgctagtcataaaccaatactgtgtaatttatgagaaggatgtaagtgaattaggcatgggctagcacaatattacacttatagagccttatgtgttaaaatttatgtacttatattttacccttgaatttagcttatctaaatcatagcacatctaagattataattaaaaattctttttggctgggcgtggtggctcatgcctgtaatcccagcactttgggaggccaaggcaagaagatcacttgaagtcaggagttcgagattagcctggcgaacatggcaaaaccccatctctactaaaaatacaaaacttagacaggcatggtggtacatgcctgtaaacccagctactcaggaggctgaggcaggagaatcacttgaacacaggaggcagaggttacagtgagccaagatcatgccactgcactctaacctgggcgacagagcgagactccatctcaaaaaaaaaaaaaaaatgtctttttcatataccttttagtccagttatctaaagtccttctgttgcagacaaaagcaatgcattaaaatattttctcaaattaaggacagtgaagtggctaattcatatttgttcacataatacagtagaatgcttaaaacttttcttgaatttcatacagagatttggcactgtaagtagtcttaacatccttccagtcccctatctatatgccttatatttcctcctagtattccatactgatttaaaaaaattaaatatgtgaattttaagatgggattttccttatgatattacttccctacaatacatgactgtgttatcaatactaactaattcttcccttggaattaaaccttcatgataggactgatgtgactgttgacccttaaaagacttatgaataaggaagaagagataagggaatattagctataaacttcttactcaacatttaaagcaaactggaactgtgagagggaaccaaaccaaggccccagttgtatcaaacacatacacacaactttatgaattgaacaaaattcatagcaatatgcaatgatacagtttgctcatagctatcccacagtttctaataaggatggataagggatgaaatgaaaaacagaagttatggggttctgagtagaattctttcactgtcatgagaaaaatgacattaggaatttactgttgattaatatttaaaatatcccacaaaaccttaccttatatcaataatgatatatatgaggcctatacatttattgtataatgttgaaatggcaagattccttttggagaaattgtacattattaaaatgatgaaactgctaatgagaagagatattcatcttaggaagtttagtccttgaaagtgtctgaactttttataaattcaaaaaaggaaggagtttcaataggtcacattctgtattaagaagccttattagaaaactaacacaatttattaggcaactttattacaaaactaaaaaaaaattattaggaaattaagaaacactcttagataactcttagaaccaaagggaaattacaactatatatgagttaatgaaaaagaagatcccttcctaacaaaataggcacatccagtaaaagctatcatcagtatagaattttagctttagatagctttgaagaaagaaaagatataaaaaataaactatgaatcttaaggaattaaaaaaaatcaaaagaaactaggaaaacagaatttaataacaaggaaaactggaatcactagaatagaatgcaaatgtaaaaatggctaaataaactcaaaatttggtgattctttgaaatggccaacataaaccccttgaggcacaaattatggaaaatatataaagaaagaatatataaaattgtaaatgagaaagcagaagtaaatcccgaaacaagaaaggttaaaagaagtatagtagaatattaggtgtggctctgcagtgatgaagcatgaacatctaaaggaagggaatcagttcctagaaaaaaataaattactaaaatattttcaagagaaagtagaaaactgtagtattccatttaaatactagagctgtttaaagatcagttatcaaaaaagcaccagaacagatggatgtttagttgaatattaccagacgcttgtagcgctgatattccagtgttctttaaatgattccaaccatagaaaaatatagagaacattaatcattttttagagaatcataattttaacattaaaagtttaagtcacattctaaaactttttaaagaaaaagacagtgatgattctatgtcatttgaaaatttaaatgcaaaaaagaaacctacctaagctattagtaaatagcacccagcagtatatgaaaagatcagcataagtgtgaaaaaaaataggatttttaaagaatataatggtggcctatatttagaaaacaaataaaaatactttagtatatcaatagattatatcattagatactaaaaagatatttaatagaattttgcagttatttctaataaaaattctaagactaggatcaatcttttaaaataatgtaccacgtaaattttggaaaaggactaataaagccctctttgggatataatttttatatcattacaagtaatatgaaaatgaggttaggttgctagatataagataaatatacaaaaaataattttgtatctattcaaagggaaagaattcaaaacaaagatatttctttataattgaaaaattataaggtcaattatttttttctgtatgaagtgcatattgatgttttaatttcatttgcagttttgtaatttattatatcattggagcagagattgtggatgcataggctttagagtcagagaggctcaattgtaaatcctgtattcatggtgatagcttcagtagtttacttaaccgctccttaaatgtaaaatatagataataataatttctacatcataacagtattgaaaggacaagtgagatggtttaaagggactagaaatgcctaatggtatgcttacagtaatacaggcttgctttcagtaccattttctttaccatttaatggtaatggctttcgcttaataaaacataggtgtcatatctaatacagggattcatttggatactttttagaaaaaatattttaatggagatttataaaaacatggatttgcttattgcattaacaaaagataattaaaacggaaacctgtgaagttattgagagttcaacctttaccttttcaggaagctaatgaagcactggccatcaaaatgagttggccatcagaatagaatttgctgaaattttgttctttttttttaatagaagatgaacctgaaacttaataaataacactaaacatctgataaaagaatatcattgatgtttaatgagctgttctaaagtagccaaatagggaaggaacctcctaagaagaggagctctctttaatcatttccagtattattttgagcaatgttcgtggggccctgtgaaattaggctctggtgaattttatagttgaaccattttaaattttactccaaaatttaataattatctcaagctaattagcactttatatattttaaaaacattttaaaagttaaaatttcaattttatatttttaaaaagtaatcaattttctccctctttatatttaatttattataacaggagtaaattttctgtgagtcacaacaatagttcattactttggtgcaattaaaatcagggaaacaggaggttcagatttaaaattagaagatttagagctgaaagtgattccagaaataaatgaacacttagaagcaaagtaacttctgagagttgatccagtgcctctttttttttttttttttgctacaccatacactttcttatagaatttacaaaatatagcattttatgcaagaatttactgaaataatcaaaatataaagtgaggcatcattatagtcatttttccatctatccagagaatatcattattgagagtcaccttaattcatggtttattcatgatattgataaatgaatacatttgggtggtttctatggtggcactacagtgttaccataagttgtgcatgcatttttgtcaaagaattgaaattgcatgaaaggtaaaggatgtgctaaaagtgaatgatgtgaactccattaagactgtttgatgtttgatctaattcatgtatagtgtgattaacccatttccaagtatattttcccatttttatttatttacctttgttttcatactaggttccattttcatttttgaatgatatttttcttgccttgaaaagtatttcagattatgtgtctttaaagaaagttttggggccaggagcagtggctcatgcctgtaatcccaacattttgggaggccaaggcaagagcatcacttgaggccaggagttcgagaccaacctgggaaaaacagagagaccagtctctactaaaagtttttaaataaaagttatccaggtgtggtggcacatgccagctgctctggaggctgagacaagagaattgcttcagcccaggagttccaggttatagtaagctatgatggtgccagtgcactccagcctgagcaacagcatgagatcccatctctaaaaagaataataataaaacttgggggtgaatgaagtaccttaagtatcataagtttattgaaaactgctaaatctctgcatctttccttgtcaaataaatacatatgtatatatacatacatattacatacaaatagcatgtgcaatatacacacacaagtagtatgtatgtatgcaaatagcatgtttacaaatacaaatactatgtatatatagtatatatttgtatatatgtatgtatactatatatgtgtatatacatatgtatgtatatacacatatgtatgtgtatccatatgtatatacatatgtatgtgtatatacatatgtatgtgtatgtatactatacatatgtgtatgtatactaaatacatacacatatatagtatacacatacatatgtgaacagaatttgaatataagtaactaagttgtgatttataaatttacctgtattacatatattaatatttaattgaaagactataaaatatttttattgttttataaatatggttttgtattttaatataaacatttcttaagttgctatgtttttacagtaggtatgtatacccaaagtagttaatatattggaaacacttctttgaattgaggtcctctggtagtttgttcagtagttagtgtgtttccacttctgaaataggagtttaattaaccagtgtgtagtctggaattagattaatttctgttttgggattatgctcaatattttaatgtctgccaccagatgggagtgatactctttctgttatatggccagctgtgttggccatgttttgaaacttgagtaatgtacagaacccttttaaaataaggaaaaaagggaaaaaagccccaaattccaaagtgggcttaaactagtataaacatggaattatgtaatgcatgtatgtttatccataaagaaatttataaaataagtacaaaaaatacaaaaacaaagcaattaaaatcaacatcaacttgatggatgatactgttttgctgaaattaaatcactgtgtatgatgtaaatgttggtggtgactgctctagctccctgtcttttgtgtttggtgaacacacaccaccctgtgccatgtgataagtcacttctttcctcaccttcagaaccacctactgcaaatcacagctatttagtgcaccatggtatcattgcactctgtttagcataaatattttcacagttaacatgtgacatctgccctttttcccttcttattagcctagggagatgaaagttaagtagcaaaacttgtgatagttttagaatacaagctaactatattaacattgataaaactacctattcttccatcaaaatatttactttaaataatttctagtataaacacagtgattattttatgaatgctaataagagaaatgccatttagtagaagataaaagaggagtctatgaaatgactgtgtttaatgtactactcaattgattaaatcttatttttaatttaaaaagacattcttggggtttcccccacaagatactaaggcccagttcaccaatcctggtttctcttattcctcttacaagttataggttggggctcacccataggggtgatctaagatgctggactagattttcaaaactactttgattagaatctttgctttgcacactcattactgctgtggtcttaggaggagctcctctcaatgagtatgcaactgaccacagataatccttgaagagaaaaaggggaaaggtgctaatgtttcttgagtaggtactaaatgcctggtgctgacctaggcatttccattacttcttgtgtcaacttggtaaggtcagtatagttttattttcttacagattaaaaaaaagatagatcacataattaaaggtctaaggtgagttagactgagtagatctgaagctcctaaggaaaatgtggactgaaaatactgaaatggtaagttgggagtacattaaccatggagaatgtgaagggtaaaagggaagagagtaaggaaataaataggtgagaagggaagagctaccaacattaaacagacaaaggaaaggaaacaagcagaagatggaacagatgtttagagtaaggatttagtaccttttcttgtttgtatcgcctaatctttgtccaaatctgctgtttgctgacatgcacacaattcctaaacaaatcccttgacattcaaatgaatatattaaactaaaacccattttttcctattaaatggttaatgcatatgaatatgcactcttccttttattctgttttgcgataaaatcaaaccttaaaagtattttccatttcagtgaatacttagcaaatactgtcaatgggaaaaaaatggaatttaaaactacatttaaaatgcaagtaatgtcagagaaaaataatgatatctttatgtgcttgaaatgggacaattagtgaaatcttatgcatgctaattcaaaaatttcaagggaaagattgggggcggttagctaacaaaattgcttttaactattttggacaatgtagaaatattatctgaactggagaccaaaaaatccattacaccaagcaggaaaatgcctacgaagtgacagaattgaatttacgcaggaagctctcaactagcaaactaattaaagcttgtcagagatctgagataaaggattggggcatgtcaacacactggcttatatgtttcttgtcatccgattgaaagtaggaaaggtaagccctattttcacataactaaagagggaaggccagcacaagcaataaaaaaactaaccagtgatttttctttcattctgaaaacaaaactctaagtctttcttgtaacatggatatcttgactttggtgtcaccatctcatgggatttatttcctcccccattagctctgccttctctttgctttactgtttcctggcctagcctttaaatgttcacgctgttcaggcctccgacttggttggtactcctcctttctttcttctgcattttctccccaggtgattctacccatccctatggcttttattatcatcgatatgctgacagcactcaaatttgtatcttcagcccacagtttttcacagagccctagtcacacacccaagagttctccttagctcttctttgctcagatctgccactttccaactctgctgctaaagtcctggttccaaacacaagtcctctctcatcatgatcagtacagtcaccaaattatccaccaatcccattcttactcactacctatacattctctattcggcaaccagagtgatcattgaaaacaatgcataatttgatcatgtcattctcttaagaatctgcaaatgattttcattgcatttgaggatgaaattaacactcctaaccatgtcctgatttgtaccttgctgtaatcacctaatgctggtggcccttcaatcacaatgctcaaggctcagagcccttctttcagtttcttggacatactgagttctctctggcctcaggatttttgtgcatgctgctctctctgcatgggcggatgctgcccttctactgctgtgactggctcccttacatctttcggctaccatgtatcattctcccgacctcacagagaccttttctgaccactctttttttttaaagtacatgcctcctgccccaccttttatatgttctctgtgtttctttcagaacacttgttactatttgtaattgtattaatgtgtatttgtgtgtgtgaattttctctgactcctccaataagcaggaagtctcatgtagatagaaatgatgctagtctaattcatacatttatctccagtacctttgacacaggaagtgtttgataaatatttgttgaacgattaaataaaccattctctttcaaaaaatgcaacttgtgtattctcttttagtctgcctcgttttcttctaaagttagctagtagtaaaatgtaattgtatgttgcagtatttgttttacgaagatgttgacaatcaacaattgtttattgtgcattttaaaagataaatatatttattagcttttaaaaagtgtgtatgaatgttttaatactcagcgacctcactaagcaatgaaatgtgtttttgtatgttgaaatgtgtaatattttatcttcataataaaaggcatagtataaatacatttcttatatattgcatatgcatgtgtccacatagacaaaattaatgagtcttttcacattgtctataaataatctctatattttctttaaaaattagttttgcttgacctcttgttgaatgaaaccttcatttttaattattactgttcaaaggaatttatgaaccttaaatatgatgttagacaaaattatcatcattaaagtttctcaaccattatgaactttctgttattccaactggcactggaatacagggacaatatatattcattatcacttttgtgccacttagttcattagttaaataaatcttcccttgactacctcttgaccatggtttccagatttaacaaatacaaattcaagacccgcaggtaaatttgaatgtcagataaataataagccaatgtgttgtataattacattctatgcaatatttgaaacatacttatactaaaataaattgttattgtagtttcatctctgaaaccatatattgctaatttgtaaattctggagaattcacattcttcttttttttttttttttttttttttttgagacggagtctcgctgtctccccggttggagtgcagtggcgcgatctcggctcactgcaaactccgcctcccaggttcatgccattctcctgcctcagcctcccaagtagctgggactacaggcgcccgccaacacgcccggctaattttttgtatttttagtagaaacggggtttcaccatgttagccaagatggtctcgatctcctgacctcgtgatccgcccgtctcggcctcccaaagtgctaggattacaggcgtgagccaccgttcccggcccacattcttctttaagatttttcctcatttgtctttctttttgtttcctttcttgtcactcctaccttgatttccactctcaatccagaaagaagttctttcaatctctaaaaccctgggtctctcatttcacaagtgtatgaaaattttctcctatttcatttcctttgtattggccagcacccatgcatccttttgttcttatgttagatgctgccttctgattttttgacacccacacaactgggcgtggtctctgctctgctctcagaccttgtgcaccttccctgttatctcacagtgttttgattcctgatttgaaatgtgcatgtatgtgcatgttttagtatgcatgcatacttgtatgtgttacatttattacccataagaccataaattttctgaatatttctgcctcggaatggcatataatagtgatttagtaaatttctgttgaatgactagaagaatgatttctttgctgacacatgaaagtgccctcctctgagaaatgggactgtctcttgtttcccagtctctctgtcttcactaaggcaagacaccaagttaagtagagctaagatacagttctggagcaatagaaaattatactatcttttaaaaatatttttaaacattaatgggcttagcagaatgtcattttaactgttcagtctttttattagtaattttgtgctttataattttaagagtattgattatcttgaataatgttgccatattattatctgggcttagaaaaaggaaagagtaggaaacacactttattttttatttttagaatctcctggaacatgttagttaaatttaaaaatgtaaagaagtatcaactacttgaatatgatgttattaccaaatgtagctgttattgtaaatgtactatggagccctgtggtaatggctgaaatggtaatttcattctaaactgtagttttcaatggcttatttaacacgaactcccagtttacactgttgactgaaacttctcaagcttgtttttatccccgaggggaattttatagagatgacacaaaaatctcttttgcagactttttcaagcacagtaaaaatgattttcctttaactattaaaaatttcaggatattttagtgacttttgcattttttaaaaatggtttccaaacttttttcttcatatgggcttctttcccagaaaaaaacaggctctgtaatttaataaagtttcaaaaatgtaaaatcattaaacattatagaaaatcaatgttttaattgtagaaaatgatttcttagtgtggctcctatcagaccactttggtagattaatattaaagttgccaaatttattttcttttgtgaacttctttgcattaatagataatcagtttattaatagcagaatttgtgattgactttgatgtcatgggactctttttagtattttcatgtgcatttttgtctttgttctattcattattagatttttactgttcttttagatatccatataccacgttcatctgttcattgtagttcgtgtgtgctttctggaattgtcatcattattcagaatctcatagatgtttaaccacacaaatacggatggtgcttgataagtgctgacacaggagattttcagacgttacttcaaattctttttgcattgagactgagctaggttgcaaagtggctaaggaatgtatatgctaagatctggctggaaagttgataacttcaggagtaagaaatacttgataatagaataagaaacttagtggcttacataagaggggtttgttttgctcactttagcttaggtcggttgagcatctgagcagagtacatctccagttcacctgtcttctcctggagacagaatggccacctctcaagcatggtgtcctcttacagaaacctccagagatggaagaaagggccaagaccttggcttctaagtctccttttttttaagatcaggaaggaacctcaagaaggagtctgaaagaagaagcaaaaatacttaaagatcaacaaggtcactcttccacttctttgccatgcaaaccctaaagctgggttcttcaaagtcatcgcttggatgaccagaactaactttggtaaaatttaatatctgaaatttcttttaaagataaactagccatctcttctatatctgatttacaatagagcagcgcaaaatgtagtaactggtggcagccttcatgtttgagagtagtccctcttgggccgtcatgaaggttaactttttgtgtgcttgcaggagatcattaaagcaagagcaatcagtgttttcttttgtttttggttggttgtttggttttctggtgtgtctttgtattcatattcagagagatatatagacttgtatttcaaaggaatatccaataggttgcttttacctggagggttcttttttgctctttagcatgtatttggagttcttttgaataaatggtcctccagtttaaactcattgggagtttattgaattgtttttaagtaaatgaaaaatctgtatttttatacctaacacaatctggtaggaatgggttaagtccaaaaactttatgatgggaaggcatacaaaaggtaaatcctcaaaatagaattatagttcaccattgaagtcatattattctgtaacatgaaaatgaattatatctttgtatgctaatagcaggttcttttattactagctattcatgtagaagcataatcaatcctagcatactgagtggttactagatattgagttatttccagaagacatttattaatgtattcaggtttgcacagcaaattaagtacatctatgaaaactatagaaaggggtgattaaactttaatgcatggtttgtagtattttaattaatcatacattattctgaagtcctataccaactgaaattcatactagtaaaaacttgaggccgggcgcggtggctcacgcctgtaatcccagcactttgggaggccgaggcgggtggatcatgaggtcaggagatcgagaccatcctggctaacaaggtgaaaccccgtctctactaaaaatacaaaaaattagccgggcgcggtggcgggcgcctgtagtcccagctactcgggaggctgaggcaggagaatggcgtgaacccaggaagtggagcttgcagtgagccgagattgcgccactgcagtccgcagtccgacctgggcgacagagcgagactccgtctcaaaaaaaaaaaaaaaaaaaaaaaaaaaacttgaacaactttctcttctctgtcattttggaaaatcatggaatttctttcctcatttatttctagccaggtggattttttgtgatttaagatatttaaatgaatgtatgagctaattcatttccctcacatcttttaaaactctgttagttttttttaacacttactaccttttgcatttatacatctacatcagtgaatgatagtattaagtttctcattaatgttcagcatggctttaaatccaggttgtaaggaataagaaccacctccttgaatattcctttcttttctcaagatagtattctacttacttttctcataaagaaatgcacctcttggacacagtgagtcactatttatataactctttccacaatttcactttctagtaaaaaaaacttaaacttttgatgttaaaaataacacagtgtcaccaagttaagtgagcaaaaaatacctgctgtttcagaatgcagatgcagccacaatctgtaaattgtgggtttatttttagaacataagacatagcagcttggttgctatgctgttctcaatttgtaaatactctatattgtgtgatcatttaaaccaaaagtttccaatcaaacagaggaacacattccttattctaatcataaggaataaataatcacatgcagtttgggagaaaggtggatgtagtttttgcaagtctcaccttcaaccactgtgtgctaatcccagcaggctgggtgaggtgtgtagatggtatctcacgtggagatcttgcagggtaaaccttaagatctactgacaaatactgattccagttggaagcattagtacattttgaaatatttaataattttaacttttcttagatatgccccacttggggactatctttaagggccatgaaaccggtatgatagtaattcttaagatttttaaatgaagaaaagcaggagaaatgttggtaataggatcagtcaaatatctgctagttgaaaccaccagatgcaaatgttttaagtttcttcccactgctactttccactctaatatagcttgttgaaagaaaataaaatttgatcatgcgggctagtcaggtctcttaaagttacgagacctctggggtgtcgatttttctggctggaaacctctgtggccaaaacacctttgcccgagttcttgtcctgcatacaggaagaatgaggtgcgcagacaattgaagggtgaagaagaggtttatttagtgttagacgagctcagaggagtgggcagctccgctctataggcagattgtccagtcgagtgttcagctcttagcagagagaaggccctggagagggtggctgctgactgcaggcaagtcatttggatgtctctgcaggtctctgaagttctcagcagagaaggtagctcctctctgctggcaggtcgtctctgcagctctcagtgaagagggtgctcctctctgcagctggtcaaggatggtcctgtcatctctctgtcctctttgtcctctggccatgctctgccctgttctggctgagcccagggcttttattgaccgcagaggggaggaagtgcatgcccattggtccatgggcggccagcaagaggcaccagaagtctccactcctgtcagtgggactggcagcccagcccccagccattccgtggcctgtgggtggggccttactggggaccccaaccccactccaagatcagagcagacgctgggaggagagaggccaggctgtgggagcagacaactctgagcctgcaggaacagggttgggggatacttcctggggcccccgagggtgcaggctgcagagatgccccagtcctgtgcctgggagggcagccacagctgcacccgggagctcacgccctgccaacttggaagaggcagggcccacacttgtcccggctcctagttgcttcctggagtgggaagcccaggtctgcagccgggtgtccagcagctgcggctgcacatggaagggcagatcctgcccattcctcactccctacaagagcacagggaggctcgatccatagctacagtttagggagctgtagccccgccctcctgggtagggctcctgactgctccgtggaacaaaagacctgggtctgcagttgcgatttgggtggctgcagcggcagggggagctcccgtccggactcagaagactgactccatggagtgtgcagacccagggcgcttccgtgctgcagccagcatgatggcagcagccactgccattattaacaggctgaaataaatgaagaaataaatataataataattgtggtttaccagtttgggtgccttatttctcctacttgtgagttctttagtggattttcttctatatctccataattttaattttttaaaaacctaatacttagtttttggcaaaaaccaatatatcatcacagtggttctggataatttgagtttggttcattgaagctgagttttgtgattaacgcttttgctctggatcacgtgtttaactctatcatgttctgtttgcttacattttggaggtttatttcgatttcaagatatttcattttggtttaccgccttgctttgtagttcatgtttccttttcttcactcaaaatcaagactgtaaagaagttttctcacaagtcatggaccgatattttaaaaatcatcgcaataaataaaaggctgaaaattggaatatgtgtaaggtgaaatctttcttcctcacacctctaagaagcaagaatgcgactgttaactgcctacagcacagacaggaacagtgaatgcacggcgctgtcatgagcacgtgaatgagattggcacttcgagagaagcaggcctgtgcactggatccttggggaaaggatgttgttgcctggctgatgacctcttcttacactatatctaatgtgttaaaatgttacaaggagaaagaaatgctacagtaagccaaggctggatcacactgtggggcattttgactagctccagctccgcatagctcagataagtgatcgcattagagcatagaatggatgctttcatgctagtaccaccttcaagttcctgagtactttttccccaataccctctgcctctcaagcctgcctatgcacttgtctgttttgaaaaatgtgtaaaaagatggcaagaagctcttatcaataaagcacatagttttgacctagatactttcatatgagaaggaaaaaaaagataaggcaaaattcagaagaaagcagggaatcaagactaaggcttgaacatgtatcttttgaaaaggaatggatttctcaatggattcctttttaagtgccagaagaaacaatgagaaacaaatgacataatgcctgggaacctcttactgctcggcaaatagtaaatgcttaatgcatttttgctgctgttaggtgaagaagggacacatgatttgtagtataaatttaggataaatgatatctgaaggcaatatgagagtcaccaagtttttgagatcttgttctggattactgtttagccgctaagagatggaacttcacattgcatgtggattacctgtgtcataggtgattctatcagctaaaggtaaaaggttttcttttctgtaggcagattaacaatatctacatgtatagcggaacataaataagcataaggctggaaagttaatttacagctcaaatgagcaaattcaattttctttacatacacactttataacctgaacaaatacctattttcttattttattttatttttatttttaggctgtgcttcatcttggtcaaaaatgcctattttctataaaaaaaagttcttttaaaaatatgtttttcaacttgataggcatcaaaagccttgaagtcaagatgacattacttgatggttaacaaaatccctggcccctgcgttgggttcttgaagttcgtagttattttcagccgttatttaatacatctgttagccctggcatcatgaaaaggtaaccaaaaatatatttctctagaaacaaaccaaactagaattttataaattactcactctgatcgttaacaataatcacgaacattaaagcaaatttaatcaagttaaatagaatagaacatgaatagaaatgtccaattattccctttttttgtaatcggttctaagaaaattgccactttcatgaaatgccatgaaaaaagaaaagaaaaatttcgtaatggaaagtgaactttaaaaaaagtcaacaagtcaacattgcaattatcctgtggccttttaatattttaatcatatatttttaatcacctaagttaatgtatgttttttaaaagttgaaaatcaaaaaaacttagaaaataaaaaataggataactacctgaaacatagattttttcctaatattttccgatgcaacattttcttttttctttttttttttttttttgagacggagttttgctcttactgcccaggctggaatgcagtggcacaatcctcagctcactgcaacctctgcctcccaggttcaagtgatttgcctgcctcagcctcctgagtagctgagattacaggcgcctgccaccatgcccagctaatttttgtatttttagtagagacaaggtttccatgtaggccaggctgatctcgaacttctgacctcaggtgatctgcctgcctcggcctcccaaagtgctgggattacaggtgtgagccacagggcacggcctctgtgcaacattttcaacatgattgaggttaaaaaaaatagtttatattgtcaatatttaccaatgacattaaatattcttctgtgtgaatgttcagtttgaatgttattatattgtgttagtttctaagattttttaaactgggtttttattgattgaatatttagttttgctctattacaaaattttgtacaattaacatatttttgtgtgtgccgtgattggttgactttatagagcaaagttatacctcattattctttcagtggattccttaaaaacttttaggtttttctggggggcgggggtgaaaacactgatatattataaatacattttaaagtgaacggttacctttatctttttaaaaatataaacttgaatttccatatattgggattaaagtacaataataaattatagctttgtaggagatcaggttaaatttactatgctaaatgtaaaaggcagcaggcaagaacatctaatcatttcgttccttaaaaaattgaccttggctagaaagaactgttttgtcttcctctgtgaatacaaaataaggaaacattttcttcaattacctctttcagcattttttggcagttttatgattttgtaaataaatgaatgaccatttgcctttttcaaaaaacactcttgttttatcttaatatttttttcctattagagaaagagagtgtgtgtgtatgtgtggttctagcatttcttttgagtgtttgattacttctatgatcctttttgtgtgtaattgcaatgactttccttctttaatgtctgctttccttagtctccctctgtctctgctccgtgttttatttcctaataagccacagtcaatctttgtgctcatgttttctccttctgaatatattctttcctgtgaccccagacactaattattgaacttcaaactatttattgaacttcaaacatgcatagatctgtgttggaagttgtgaggcactggttcttaaactttaatatgtagaagaatcactgggagctcatttaaatgcaggttccaggtcactgtttactgaatttctgattcagtaggtctggggtgaaacttggcaatctgtgttttaaaaaattgctctgcacgatctgagacatgtggtccctgaatcacactgtcaaatggtatgttcaaataaatatgagccctagacttccatgaggttgtgaatgtcagtggccctattttagagaaagcttcttaaagcaagaagatattgagctgggccttgagggtagaattttattcttttgagagaaggtcacagttaattttaaggataaacagactgtgttacagacccctgtcatcttccatctttgctgattggagccacctctgtaacttcagtttgtttgtattccattaactgactttgttttctattgtctaatccaggaatgtaacacttttcaaataattcacaggatagaaaaaatatataagaaatttctaaatggcatgaccccatcactaaatcatcataaaaatgagaataccctattagataatagggaacttagttaaatagggaacttaaaaaagttatctagtgataagatctctagtaaatagaaatatctagttctctagtatgtagaccgcctatgtaagcgaacagatgaaagatataaaagggaaatggctaaggagagacaacttaaaggtagttaatgccaccaaaaaatacctgttatgtacactaagctattttcacttgatactttttgttattggcaaccaaaaccgaaattcaagaaacaatcccattttccaaaagtgctttgttctgagagttattttccaaggtttctatattttattgtcagttgagtttattctcatctaaaatgagcacaggatatatttatcaattgcattttgcttatgctcttttcaataatttctagttgttaacaggacatgttgacattggctttctcatttttaaatatcttgtatggaacagtagttgttatgtttaaaaaatcagaggctgagatattatcagtgaatgctttttagttatatatctttttgatcagctgaaataatgatcacctattccatgatataaaatgtgggaataccataaatgtcattaattatccaaactgaattgatttctttacaatttactttcaactgaagaacaatgggagaattagttgcctaatgcttgaatagaagccattgtaataatggagagaattggaggtatataattggtattgattcaaattgtacaaaacccatattacctaattttatggcggtggacaatgcctatttcttcttaaaatattaatagacttaggattctggtaaagagggtagagaaggcatttaggtaaattgaaataaggcacttagtcttctaagaaagatgtatgctggacatgactcagaaacactttcgggggcttgggaattatatggctgctctgtaacttacagaaaaccaaacatacctctttacctgattgctgaaacatttgcacagaacgcagttttaactacataaaattttattttctaattatttttaagcatttggtatttctttatcaaaatactcagttgcattatgtaaaacgaggtgcttttggggatccatggataaaaacaccgaatggaagtcaggagacttggatgtctgtctgtttcattgtgtgatctttagggcctagaacagtgctcggcatgtagtagttactgaataagaatttccagaattaatgcacgaatatgtttctgaccctgttacctttacaaggatataaaaaatgtaagttcttctttcttaaatttaacttctattttaagcccttattcctttgggcaagataaaacatgttcctaatcaatgtcaggtacatcctatgtcccactggagttacagccaagtactcaggagtttgtggagtgtcaaggtattggatcagctgtctcaccctcagggtcatccgtaggtgagggcatcctgagagatgcctgttgacccagctggtcccagctcttggtgcatgcaggtctgtgctgagttggtccttgggctttcatattacaatggctgactgagcacatgctatagcctccctctcctggaaggctgggaatgatagagaagatattttaaataaataaatatctatatagctgagttcaaatattggaaacttttagtggatcaagaactgtaagtaatcctcaaaggataggactggattgaagaaggccttctgtgagtgccaacagcattagacctaagccagggcaatgaggggctgacttctgggagcagcagccaggtcacataccagctgtcacacccctccctggactcggacacttactgtggttttctgtatccagttgagagcagcaagtgtaggagcttggtttcaggggtctagggtggtacccacggtgagattcatggagcacatgtatatccatagcctggaggaatacagtctgcccattcccatgcctaggtgatcggctctggaagtgaccgtcaacagcaacaccctaccactgtccttgaatactctgtccagatgccccctatggcctctgcctgactagtggatggcacaagcagaaacagcagacagtccaaaaggggatttcaactataaataggagcacaccatcaagactccacaaacatttgaggaaagtgtacactgtaaaggaaaataaactcacagccaccctgaaatggaaaggattcattctgagatgtgagaaattgtgaaaagctttataaatacatcagctatctagataaatttcttctcaggagtctttctttttccctagagctttgcttagaaaagagatacaggttccctccaccttttgtgggaagtgctattcccctgtcatcctcaaaggcttagggtgactctccatcagacctgcccaggtctgagtttgcacttggctaactgcaacctccaccttctaggctcaagtgatcctcccacctcagcctcctgagtacctggaactacatcaccacacccaactaacttttggatttttttgcacttgttttcaaataagttacagttattcatactgtctcttttgacaataaatgatatgattattatactcaaagattatctgagagacagggacaagttcctgggacccttttctcagagtcttgtgactgcgacacactgtttcccctttaaagtccctgccttccttcaggctacggagtcctgtgaggaggagggttggggatggagagactagtttttcctcctcaaggaatctgccaagcctattgcctgtccactgagtcccttctttggactctttcttccctctattttctgctaaagccgtcctaatcttaaatgacaaatctagaatggcataggcggatcaaatgggggagaaacaataggtaaaatgtggagtcgtaataggaaacacacacacacgttaatattttaaacatggttacatgacagcccacttagtatccatatggcctttgggaaaatcacttattttaagcatctgtgctgtaatctgaaaagtaccagaattgtaagatttcactgaactctcataataaaatcatcaagcttagagtttaaaggaactttggagatgaattagctcaaccttccaccccctataggccttctttccaaatatctttgccatgtgattatccagccactgaaaggaaatgttaaagaataaagtaagaagaggagttaagaataacaataatttgtaaaaaataaatttaaaaggtgtgttggatggaaaagaattcaggagacactgtgtggacatgtgtaacatgggcatcctgtcctccggaaagacatttaagatgttttgcaactcactgaggaatagatgaaattaaacaaaacaaagcaaaaatttgacctagtacttggttcatagtaagttcacagtaaataacaatttgtttttatttgttgctatggtcatgacggtggtggtgattctttaaggtctggaaaggacactgtctacagaaagcaaattatatacagaaggcagatagttacttccagattcgactacttcgtgctttcccgtaaattgcctgattatgaggcaacagttcccagctgatcgactcctaattttaatgctccagtttcaagtatcatcacattttaaggtaaaaggtctctatccccatgctgggcgcggtagctcactcctgtaatcctagcactttgggagcccaaggtaggcagatcacttgagctcaggagttcgagtacagcctaggcaacatggtgaaaccctgtctctacaaaaaaatccaaaagttagttgggtgtggtgatgtagttccagatactcgggaggctgaggtgggaggatcacttgagcctagaaggtggaggttgcagttagccaagatcacaccactgcactccagcctgggtgacagagccacaccctgtctcaaacaaacaaaaaaaaaaaaaaagaaaaagtctctatccccatagtttcttcctttgaccccagtggtaggctgtgtccctgtctgagttccaggaagctagtctcccattttcattttgccccagctgcagatccctccctgtctgactgggcctatattaaggggtcattgacctctacctcctgggtcttttgcatctttcaagacagaattgtggcctcagtgatcttggagtctcgttgaatagcattctccaaattaggctcagagaaaagtttatatttctcttaggcctttgggcattcttgaaaatactcacttgcttctcttctccactgtaaatgcaatttacagctccttaaaatctacagcatcttctgcaacactttctgcatctataatggaatgtttctgccaccactgctttcactggctctccctccactgttcagatttgtggggtttttttagctcagttgtatttatctctatataacaatgtatacccgtatgatctactttacagaaaattaagataaggaaatgcatacatataaaataaataatttagggagaattactaacattataaaactgtgtttcgcctcctagagcattcactgtaatttagttttaacagtgggttttcctggtgtatctaaaatatagtttaactttctttaaattatttgttttacacctagaaaataatgtatcggatgaatataaggaatttgtttttcagatgtgcacatattccctaggccacaaccaactgggagatataactagaggtgtgttaattataaaagcctcattggtgggcgggttggcatcccaccttgttccccactccactgcctcttagcctcaccatgtccccgagcccttttttatcccctggcagatcccaggtggctcacacctttcaccatggcggtcatgaaagacttcctgctctggagtctctgccctgttcccattgcagccatcctgccccgcagcatgcagctgtaaaccgccccatgctggagcccctttcccatctctgtggtcctggccttctgtttctgttccatggcagctgacaccgcccaggggagttagggtgaacgtttgtcgcattactgtcttctgatgttcctagtattttaactctttcaatgtcctgcagcctctgcttcctacgtcactgtaggcttgcaaaacctctgtttggaggaagacaggagggaccagtgagtgtttaactctcttcttattctgggtaaggtctctgtgatacagtgtgaagagaagtcctcctgcgtcttctccccgatcccctattggaacacagagacagtctccatggcatctcatccctaggcccactaggcagtttttgcaccagattaggctgtttctacactaaatgttacaacttggggattcctccaggtatcacctcaggaactggaaatgttttgcaacaaatcgggaaagggggatgagcagcaagagaggaagagaaagcaatggtaaaatattcctgatttggaaatttttattttattcttatttttggactgacccttattgcctctcggtggccacttttaccatgaatgtttttggttttggtgttgttttaaatgaggcagcaaataaacaaaacagaaaatctcgggatttagagatttatcttcccttaggatatccctccttcatgaatatttataatatagatccagctaattctttcaaactgaaaaggtaggttacttgaatgttatttttagtttgagtccagtcaacaaaggacattttctactgtagatgctcctgttctgctaggggcctctcaggaggggaggggacagtcccactgatgtacctgcatttcttatctcttttctcacattgaaaagagttcacagaggtgtcaaaaaaatgtgtgatagacaagaaaacattgagtgtatatgtaaaatgaaggcttttccttgaatgtaccacactgagatagaccctaagctgctgggagtcaggaccttctcactggagcctcttgaatttttgtagtaccagaaacactactaggcctcatggaggccattgtttcagaatttcatcagtgaggtactattgattcaaaagagttccagggaatcttactcttagggcattcttgatctaaatgctttctctaaaactgctttcagtaatgtgaaaagtcaacctaaatgtgaagtattactgctgctcctgctagtgccagggaatcattgtaaaactctgaaaagaggtaaactggctttttcatcagagcaaagctttgcttgtgtatcacaaacgtcctctgtcctgaatgactgctgcagtgtggaactgggaccttagccaccgtggaacttcaggacagcaacaggagactgaaggaaccatagaagtttttgttttgttttgtttaaaaaaagaaaaagcaaaattacttgggtggctggtgcacacctgtggtcctagctactcaggaggctgaggtggaaggcttagttgagcctcggagattgaggctgtagtgagttaagatcaagccactgcactccagcctgggtgacagagtgagatcctgtctcacatacacacacaaaaagcaagtttcactttcctatcatccatcacctttaacacttttctactaatttttttagagggcactatttttctcctgtcccctgatccaatagacactctttggaggcatttcttttgaaagattttcctacttttgaataaccttcttttctgttactagaccgccttccagtgagaccacatcagaacagctgttgagtagacagcttttggcctcacactgacctgttttccatctacctccatgccctagacttttgcaccagtgatgtaatctttctcttttctctttcctgtaatatgggaatggtggtagtaatagtatacacactattgggttttacaagaggtgaatgagacaagcacaaagaacatggctatttgatcaatgtccacaagtgttattagtgcattcttagcagaatgaaatatggaacaagtcagcttcacacatgcatcaaaatcctttgcccaaatttcttgttatttcaaatgaaaccatctcttaagacataattgcatggttctgtaccttcattttctacttaacttcattaatatagatatggtttgcatgcaaatgagcagacttattatgtacaagtaacatggaatatatttgggaaaaacttaccgcttcagaggggaaaaggcacgggctttagcaatactgtgagaaaattctttaaatctccctcagtggattaaacaaagtatctttgaggtttattagaaaatctttgttagtgagaaattacactttaaattttattcttcttcctacgaagtggagttaccattcagattaataaattcaaatgagcagaaatgtttgagggaggactggatttctctggattaatatctactttctgtttcttgtatgaaacaatctttaaaactttttaggctgaatatttatacctaagaatttgcttgaaaaatctgaatctggccaggcgcggtggctcacgcctgtaatcccagcactttgggaggccgaggcaggcggatcacgaggtcaggagatcgagaccatcctggctaacaaggtgaaaccccgtctctactaaaaatacaaaaaaaacttagccaggtgtggtggcgggcgcctgtaatcccagctactcgggaggctgaggcaggagaatggcgggaaccagggaggccgagcttgcagtgagccgagatcgcgccactgcactccagcctgggtgacagagcgaaactccatctcaaaaaaaaaaaaaaaaaaaaaagaagaaagaaaaatctgaatctatattggtttgaagtaatgtggttccattcttttggcaagacttaagatatatagcctgaacaaaaggctctgtagctttcacagtttcaaatatgctcataaaaccccatagcataaataaaacattttagaatgttctaacaatctagaattataaatgagtcatgaaatataagggggaaaatttatatacaaattcagccttgaaccttcctgaacttactcagagttgagttaaaaaattttaaatggagcttatcacgtttgtgctttggtattttttatttttagtgtaagtaaaatagatacatatatgtgctttgtgatttttgatttttcatttacctctctgtaaattgtcataaatgcctgtggatttgtgcctaagccttatattaaataaaaaaccaagttgtgggttcactagcaagaggaatattacttttcctacttgcaaaaatacaaacaaaaatacaaaatattttattttcagaagaagttgtaggaatagtataaatggcatttattaaaacacgagtattagactaaagtctatacatgcaggttggtggtttttgaaatgacttgattggttctttacaatttggtgattgtgttagtacttccttattttggtgggaaatctgtgttcctgaaactaagaaccctctgtgggagttagactttcagagtctacctctctgcctgcttaatactgggcccatcccctacccctacatgccaggtaactggtacaagaggttaatgggccctgctttgagaaacagcttcagagattagatccactcatctccttagggcctttctagaatgctccatggttttccatctcctagaatgtgtttattttcattacagttttaggacttaaacatacagaaataataacaatacacagtactttttttctgcctcaatttccctgaagaagtccgtctttggaagtcaaagataaaataatttgagataccagcttgatgtaagcaccaaaacacctactggcctcttttgtttagaagtgttgtttctgttgagtatgactgttctccagccatcattcagggaagagtatgtgatgtgttttctatatttataatgcttagaagatcattagcacatattagccacaaagaagcactcttttacattgttaagtgtctgcactcaccagaggctctactttgccaggttagttccctttgttcacctctgtcattgtcaattttttgaagtggaacttcacacaattgtgagagagttcccacaagttgcaggagctgcaggtgctgggggaaaggcattgacaacacagatgcatacaggcaaaggcaaccaagtctatggagtggtgggagaaccaggctcaagattttaaaagcacttggagtctttgtgttccctgtcacacaacttgaagacctacttttataggtggaaaacagcaggtggccacagagacataggatctgctgtcactgaaggagagacttgttcgtagcactgtgccctattgctaatctttcctactccataccactgaaggagagggggcagtctgaacccagggtgtagccatccagatgaggctcaaagctggacaggatgtagtgaaaaaatggagccaggataatgaacaattaagagcacacttattgcacctgtggctgtgcgcaactgagtaggggtaccttagaatgatgcatttccaaaatttttggaccagtctacacttcaatatatgtaaccaaaataaaagttcatgaaatatcatttatacatattccatgcaatactttatgatattttctattctatcttctgccctgttcttttcttgtataatttattctacatagctattaaaataacatctgacctcaaatcattaaattccttatgcaacccactaatagatcatgacctatagtgtgaaaaactgtagtttattcttaacatatttagctaaatatgaataacgtgaatcaaaactgatgataggcatctactggattgtgtttaaactattttcagacataatgtatgtaaagtgcttagcaaatactctggcacaccctatgaagtcatttgttattggctgttatgttcaatatataaatcaagacagttattttcatgaaggattccaatactttactgtgttatttgaaaaccaaacccaaaaaaatggtaatagcaacacctgtaacatgtagaataattgttttggagacggcataggggagtttggaccattgttcattgattagtatgtgcttctttatttgccatgaaatgactatacacatttccttttctttatttatgtctgtaggagagattgaagatttgtccaaatttcctttaaatgtttaactttctttctcactaccgagctgacctctttcctatcccttctggcctctgtgagctccgccctctttcccagttcatcatgagctgggaaattcttacatcaatgctgacagaggaaacaatgcacctacttcataagagaggattaatttctttcttttgctccaagttttcaaccttagagtgtttatatttttcatatactttgacctatggaatattattaatagatttcctgatattaaatattcctttactctgtaattaaaattgctaatttatttatttatttaaaatatgacttaatttcttatgccagcatatcatttggaatttttgaaattatattcataaactagattagcatataatttctgattcctggattcattcattcacttactaatttatgtatcattgaacaaatatgaatcgtgcctggctttatggaatttatagtccagtaatagatacatataagtatccttgaagaagtgacatccaaactgacctctgtgttaattagaatggggcactgtaacacagagatctgattatcttaactgactcaaatgagagatagaagtttcttttactcctacacggcagtctgaagtgaagcatataggcctagtggggtagtcacaccaacctcaacatgcgacccccaaggttagctccattcctctgcctttccaggccagccatcaagaatatgtacacggagtctaggacaagtgtccttacggagatagcctgaaagttgtacacaagtcttctgctcacatcctatatccacacttagttgcaagggaggctggcaaatatactctgtattgggcagccgggtaattggtgaaactgagggtaccacaaagaagaaaggaagactggataaaggagagcaattagcattcgctgcccaatatctaaaagagtaaataggaactaatcaggggaagggtatagggagtaagaaagactgttctatccaccttgcagttccaaagaggatactgagaagcaaatgggcagttttgtaatgcagtgttggaaatacaatgaaaaggtatgtgcagcgtactgaccactgaggggcacatgtgaggggcacctaacccaagcttggaaggcaagatgagaggagctttcctatctaggctgaagtctgaagagtgaagtcaatcacccaataattgttggaggacaaagaagcatgaaatttgaaggccctgacataaggctgagcatagagtgattaagaaacgtaaaaaaattagtttggctggtagacccattgcagggaaagtcatgacaagaaatgaggctctgagaggttagctagaggaagatcatgctttactgaaagctaaggagattggactttattctaaaggcaagaaggatttgttcaagggttcaactcaggagaaggatggatgctatttattatacaaacccagtctgagttatagctgccacactaattcctgtggccgaaggaggaaggcacaaaatatgaaaacttcctgctcaaccctctagaataaagctaatataaatgcttacaatacaccttaatgtggttttcatacaaactacttagctgcaaaatacttcatttagttaatgataattgaatttctactctatttcgtactcattgattgaactacataatgtgcataccctgagaaacaaacaaaaaatcattctacagtgacataaaatagagccttataaatatatttatcaacagaatgagaggaagaagtaataaataaggaagaaagtacagtagccattaaacaaacaaatgatggaagacattaatctggaagtgtatattatggtaacatctaaatattggatacaggaagataccctgtattatttttaaggcatttcacacaccctgctactgtacagtgtgttcctgatgatgtgggtgtcccaatttgaaaaaaatactaatatgctcaatgtctagagtgagagaggcctgagagataattagaacttatgaatgaactagggaaacaccccaaatgccactccattaatttaaagtgaggaatagaatggttgcacccagtggaaatgcttctgttagcataatcagcttatgtcttatgtcgctctttagtcaagctttatgggaagccaaatcatagtcagacatcacttcatcaatttcctgggagaaatcactgtaattcagactagaaataattgtgacagcatgatggacacattctgtgctcatagacaggcttatgtgggaatggggaggttgcttggtgagcagggaatcaagagtgttggttgaataaaatgtaaagaccccttggtgagagaatatggtgaccctggctcactttagattttggtggcagttttctttattaaattttagcttaattctgaaaaagtgatactcaaaatagtattgtcttttccaagttctaaggagcacagtagcctccaatgcttataaatatacaaaagaaaatttgagttaagaacaaaaatattttagatactattatagtactgaggagcagcaaaaatccataaaaggtcatttggatctgcttttttttttttgtaccttcagataattttgattagctttcatttttatttgcattacccagagggcacacactggaatccaccagaactgaatacacattgttttgtttgccttgcagtgcatttttttttccaccggatatttcaaatgaaaatcacataaatctgtattgctgactgtcatcttgaaaaaggatacctgttgaattgggtaactcttttcatgaaaataacttaaaaaactggatgaaatataaaagcatcttttgaatgtattgtgacttttggaaaaaataagatatcccaaaatgctgaaaattaactgaagatgttcggcttgaaatacaggcgccaaaaatggatttcacacttagggtttctggcaagccctgattcagtttttatttgaaggatgaatgtcccggaatagataagatatgaagtctagattgtgcttcagatgggaagttgaacaggagaatctccgtatagagtgggaatacaaaaggacaacaaactataaagtgagagcatcttgtctgtgtcaacttcgatttgagaggagggaaaaaaagtttcctctgaaaatttgagttggccctaaacaaaatttcagccaaaattcatgctacctgtgtgaacaaactccaaatagagaatttaatttaaggtggtcccaggatggtagtgaaataaacagttggcagaaacaaattttctagaaatatgaagtttcttataaggtcttaaataatttccacaggtgtatttcaagaaatgtgggcttaagccaaaaaatatcagtaaagctcataaacgagtgccagtagaacaaacagcaaaacacaggagaattacatctataaaagctacatatattggaattatgagacataaatataaaaaataattttgtgtactctgttttgagaattaaggctttaaaatggcaacaaataaagagatattaaaaacaacataattaaaaacaaatcaaatagaacttttggaaattaaaaatatatatatctatatgtgtatatgtaaatcactatatgtatatatgtatgtagtgatttaaattaaaaattcaatgagaatgagatatatctgctccaaaaaaagagaattaatttgttccagatgaattatctcaaccaagaataaccaaatcttaaaatataataaacatttttatagcactagaaaagtactaagtgaacaagattctcttctggaaagagaataaattcagaaatgtgaacattttccaattaaagcaatgactgagcaatgagaagctgagaagagcttcgggcagtttcactgatctggagggacagaaattgaagaacaaggtccagaaggcacctattcccatcacgcttgctgcatacaaattatcccaaatgtagtgttctgaaactattttctatggtttataaatttaaggaagtcacagcacatagcatggtggcttgtctctgtgccgtggtgtttgaggcctcaactagaaagattcaatggctgggggtaagaagactggaatcatctggaggggtattcattcaaatgtgtgagacttgatgctggctgtcagctgggatccgtcttcccaaacacaactgaagacatcatcccaaatacaagatatggcctgttcatctagtatctccaaattgtcttatttgggattcctcacagcatgggctttaaggctgagaatatcactttaaaaaagcagaagtacaaggcatttttgtgatctaacctcaaaaatcacatgtctggatttctgtcattctccatcgacagagttgtcacagatcctgagcatacactcaggatcaagggaaatagacatggttaaaggcagattatcgttggaaaatagaatctgtcacaagactctgggcttttattttggattctgaaatggctgaaacatggaaatcagacatcacaaggactgaagcccagtttcaaatcagctgagtctcataatgcattaagatgccatgttccttctacaatattcttctcacagcaaagaaaatttctctctggaagaaaatattatcatccataactttctgtatgctctgcagttaatacacagtgtatgacattaaataaaaaatgagatatgcaaaaatatataatggccaaaacaaagaaaaaggtagcaaaaaagcaaaccacaaaagatgtagatattagaattatatctacaggggtatttaaatataatagatcgatgtaattatgcattaatgtaatactatagaaattaaatgacaagatggagaattatagcagaagaagagagctgtagcaaagaataaaatggaaatcctagaattgaaagttataataattcaatgatttgaatcatagttttaacagtagattagacaaagctaaagaaagaatgtgttaactggaagatgaattaacattaatttgtagaataaaacagacaaaatgatgaaaatccagaaaaaatataagacataaagcatagttaaaaatatcttgcatatacatacctaaaatacccatagaagaaaagagaaataaagggacaaagtcaatagataactggtaaggattttctaaatctgatgaaagccattaagccacagatttaagaaattctaggcactgcaagaaaactgcatgtattagtacttatttcatattaaaatatctaaaaccacaggtaaagagacaaagttaagtgcaattagagatttaaaaaaagatgttagcattctgggattaaagtgatagagatgtctgacttttcattagaaacatgaaaaccaaattcagtggaagaattattggaacactgaaaataactgatattctattatttttatactagcaaaatgttactcaaaaataaagttgaaataaagacactttcatataaagaaaaccttagaatgtgtcaccagtatttccatacgaaaggaaatacttccagcttcatccatgtccctgcaaaggacatgaactcattcttttttatggccacatagtattccgtagtatatatgtgccacattttctttatccagtctatcgttgatgggcttttgggttggttccaagtctttgctattggaagtagtgctgcaataagcatacgtgtgcatgtgtctttatagtagatcagctaggtatgtattattcgccccattttgcagatgagaaaggaaagcccagagagagtaaaggatttgcccaagttcacacagagaacaggtggtggagcgaggatttacacccaggctgcagaggaagtgggggcagaagagatgaacctgcattttatatcatcatcacacttgtttcttgaatttatacagtaggttgtgtgttcatatactgaaaacattcacgtatttatacatggggttaacaggttgcattaggtggtgagaatatggttattttgtttttatttgcatttatgtgcatccaatttatgtacccattatgaacatgatatcatatgtaataagaaaaaatacaataaatgcaattttgaagcacacacaacaaaagaaaggtaacacttaagagtgttcttcatgcagaagagatacagaatgcagaacaaacaggaaatatgagggtagctccaaatgactgttgactctgtaaaactataataactactttaaggtgaaatatagaaagaactgaaatatatgacagagcataaaaaagtgtggtcatacagtaagtagaagtaaactagcctaaatctgcattatctagaatgtgataaaagtagtaatttgttctatattcctttttcttattattttccaaatcatttaattatttttagtcagtgacctcctacatttccttgggagttatacattatttcagtactcatttagtggataccatagagattatcatctgcagtttctgcaaagaatgaatagtaagatatatattagtaatggcataacaatagtgactcaaagaggcaaaatactccaattaaaagacagactttcagactatattgaaaaacaattagaaaaaaaaaactactttaaaattcatacggaaccaaaaaagagtctgtatagccaggacaatcctaagcaaaaagcacaaagctgaaagcatcatgctacctgacttcaaactatactacaaggctacagtaaccaaaacagcatggtactggtacccaaacagatatatagaccaatggaacagaacagaggcctcagaaataagccacacatccacaactatctgattttgacaaacctgaaaaaaacaagcaatgagaaatggattccctatttaataaatggtgttgggaaaactggctagccatatgcagaaaactgaaactggaccccttccttacaccttatacaaaaattaactcaagatggattaaagacttaaatgtaagacctaaaaccataaaaaccctagaagaaaacttaggcaataccatttaggacataggcatgggcaaagacttcatgactaaagcaccaaaagcaatggcaacaaaaggcaaaattgacaaatgggatctaattaaactaaggagcttcttcacagcaaaagaaactatcaccagagtgaacaggcaacctacagaatgggagaaaatttttgcgatctatccatctgacaaagggctaatatccagaatctacaaagaacttaaacaaacgtacaagagaaaaagaaccacatcaaaaagtgggtgaaggatatgaacagatccttctcaaaggaagacatttatgcagccaacaaacatatgaaacaaaactcatcatcactggtcattagagaaatgcaaatcaaaaccacagtgagataccatctcatgccagttagaatggtgatcattaaaaagtcaggaaacaacagatgctggagaggatgtggagaaataggaatgcttttacacggttggtagaagtataaattagtttaactattgtggaagacagtgtggcatatcctcaaggatctagaaccagacataccatttgacccagcaatcccattactgggattggtaaattacaaaggattataaatcatgctaccataaagacacatgcacacatatgtttattgcagcactgttcataatagcaaagacttggaaccaacccaaatgcccatcattgatagactggataaagaaaatgtgacacatatataccatggaatactatacagccataaaaagggtgagttcatgtcctttgcacggacatggatgaagctggaaaccatcattctcagcaaactatcacaggaacagaaaaccaaacaccacatgttctcactcataagtaggagtttaacaatgagaacacatggacacagggaggggaacatcacctactgggtctgtcggggggtgggggggctaggggagggatagcattagcagaaatacctaatgtagatgatgggttgatgggtgcagcaaaccaccatgacacgtgtatacctatgtaacaaatctgcaagttctgcacatgtatctcagaactttaagtataaataaaaaataaaaattaaaaaaataaagctatatactatatgctacttattagacatgccataattataaagatgcagaaaatttagacataaagagttggaaagacattccatgccatccctgatataaatttttacactgaagaagaacaattaaagttaaaatgtgtgggaagaagtacaattaaagtcaatgctttgtggcaataataggaaactagaaatggatggtgttagaagtggatgaggcattcttttaagttggcaaaaatttcattaagattttttataacattttattatgaaaatttttcaaaactatggaaaacttgaaagcatttgagaattgatgtttatgtccctaatacctagagtctacacattttgctgcatttgcttcatgacatacctattcatttttctgttcattctttcatctattttttcaaatttcaaagtgagttacaagcatcagtgaatacagtatgtttttgtactaatgggaataattcagaagagagaaaatcttttgatgattctaagaaagagtgggaaaatcactggaacaatgtccttgaaaacttagggtgggtaggaatcgtgtgagaaggtaaaagctgtcaggaggacctcaggcacttgatcaagatggaagttccatgggggaaagtcagagtataaaggtcaggggcaagtggtgggcagaggtgataatagggtatgtggatgttctcacccattctaccttctccagaaatattaaacatgatgtaggaaatcagcagcagggaataaagttggcaaagacagaattggattcaggattgaggaaaagctgtgaagtaatcatggggataaataaaattaggattttagagcatccctaaagcctacttgaggtacacggttatgaatattttcttatggtaccaatgtagatgacttaggaagaattgagagcaatggtgtttttacaaatattgtattattcatatagtgtttgcacatacttatatgaatagactaataatgtttcagtaacattattcaaagacatggacaggagcatcttcttctcacttagacaacctcacagcaaccacaaacttaatgtttttttatagtgctgtcaaattgcgtcgcctaatttagaaatgttacacataaaactttaatgttaagggagacatttaatggctgtgagttaggaaaactattcataacatctttttatgctgagtaaagttcagaaagaaaaaagtgtttagactatccagtaaataaaaaatgtattatgaaagaaaacactcaaccatttgattttctgacattgtttgggcatcatcgtgattgcaataatatctccagctcttttattctccagaaataataaacaagatgcaagaggttttagaatttatttttgattcagagcaaggaatgctatgcacttctttgtcaactatttgagcttaactctgtatattttataaaacttagtatttaagtttcatttctgtgttttttttttaacattggaaaataatttcacatttgaatagaggatgtcagggaaataacagattataagcctcaaatcatatctagtgattctgttgacatcgtaataggctgcttgagtgttagatgttagtgaggactttttggaaagactctctgtttttctgctgtgtcagttagttactgttctaaattctttcatgtccccacataaagaactaaaagtaattttaatagaaagtagagaacaagtggcttccttaaatcttcttttgtctttaagaacttctgagttaacaatgtctgggagtctagaaaagaacagatcctcctttgctcagttgtgaattcttcggtgattcatggcaaactcaagaaaaaaacacaggcatctgttgttacaggaaaattacctgctttatatcagcctaaagcggcatcatttagtgaggtctcaaggccgtatgaaaccaagccttacatttttttttttttggggtattatgtgaaaagaaatcttctctttcacattacttttttttttttaatgttacatttgaagaagtactaagaagatttagaattttaaaaaactgctaagctccattccattatgtttggaaggtcatggatttatttgcattcacttacaagcacttggggttagggcagagttgtcatcttggacacactttagtgtatgcaactactgattaaaataatcctagaaccaaatttaaatcattagaatcacattttttagtttcatttaaagtagaagaggagattttatttcttatgaagggttacagcctgcaggctggctatcctgacaggctggtaagccagacacaaatacttctagggatgggcaaaaggaacaggaatttatgttgagcagggtggctgaatatacatattcaataaactataggagcagtcatgagtatttatgaaaggagaaaatgcacatgagcaattcagctttaagcctctccatgggtcccatgtacaaaaaatggcagccttaagatgaactgagagtggagttttcagccctctgtcttcaaaacatgaagcagaggacatgaacattcttactgtgtgttctccatagactggccaggtccactccatggtctcttatcaggcaaaaaaggaggggcagcatgctggtttcgttttagcccttagagaagaaaggttaatggaggttagagagggtcagtgtgtataacgagggatgtctgacctgctatcttgtcttggctgagaactcagttttcaagattactatggggtcccctaccaagaggaggtctgctcagttggtttgggggcttaggattttattttgatttctcattttctctcttttggccaatatttgccagaggcagcattgatggctaaacttttattttttcccatatcattgccaggatggtgtggctacctgccccaggtctatcctgtcccttggtggaagccctatagacaagggacttagagccaaaagacttacagccaattaaacactctaggtcagatgggaatggaagtgggtaggcattcatcaacaaacaatataaaagccaaaaaccgaagccaaaaagcaaggttacaaagtcgctttgtaaattctgtgcattgagctactgcaatcttggaattagttaaaggcttgtagccatttgctgtataaaacataagcattctgttaaaaccttttaaggcaaggaattcagagacctttgttgtgccacaatgctttttgcagtctccactgatttgtcctaaggtagcttaaaaatttatatctctatttgtataaaacccataactgggaactgcaacagccagaagactctgtcaacaggtttcttgatatcctcttggtaattgtcttttaagtctatgagaagcaggaaaatgtttacggttggcatggatgaaaaggggccacataatggcccaagaggcagtttctcaatctttcagttgtttaggcatgtgtgtgcccatccttgatttggagggtctgaactaattttaatccctcaaagccagcacttacaatctcacatgcccatctccttcttccgcagtactccctgggcctagagggaggatgcttctttggttttagcgatagggaattggcaatgaaaatgagatcagacccagtgggattccaaatgtgggagatttgcagccttatttgaatcatctctaatctttagagtaccttgagaatcacttgttgttggaagacttgtcttctatagcttaattttggcaaatcagtatgggtctttgaactaagaaaagcaggtttcaacagagttcagattcctttgtcataagacagacattcaagagactttaattgctatctcttctaatccatttggtaaataagatcacagatctaaaaattataaagttggagggtcagaaatggtcaagtcaataccctcattttacagatttctaatctgggaccaaagataactggttttctcagggtcacatggccagttagtaaactcatagtcatatttagaacagagggcatatcaatatgagtcttaacaatttaaatagaatttaccaaatttcatctgaatcctaattttaaaaatccaaaatcaccaaaatgttaagtttaattagagtgtgaaaatagttcctccatagttatgcaatgtcactcctgacaaactttgtagagctgccgtctgaagtcagtcactgctactttaaacttccgtgcattaaaaacagaatcagagatgcatctccatttcttgtgtattatacacccacatgttcttctggaaactctgcctgcagttctgacagtctgtcaacacaagccatcaagtttagctccttatagtttcctggatatcaagcacatgtaagtagaaattacatatttgagttgccttttcaaatgtgttgcaaagaatagtcagtcttcaggtttgtgatttaagtgtttgattgcattgcagacctccttgcctggctttctggatggtaacttttgtggcattaagccaaactgtgaggccaggtatagcctcattctcaaacacatctctttctcctccaaagcatttgaaactttgtcaatgtagaatcattcctttggttcctaaaataagccctttcgttcttccagagtctgttgttaaaaaaaattagtattttgcattgttatacagatttacaaattatacatcactttcacatatttttttcagttgaaactcaccaaatagattttcttcataataagtggcataccacttattatacaagaggatgtggttgaaacagtctgccccaggaacaaccaataagaaggtatactctagaaaatttaaaaacaatgactttaaaaacaatgacaaaaccattcaacattaacttgctttttatttttgttatgttatagcaattctaaacagtattcgtgataaaatattcctgtccaagaaacctttatttatttatttatttttggtggctgcgcttgctgttgtgctgtgataacatatatgtaagcttcggatgagtatattttatattttaagcactactttttttacatgggagttagtttggataattctgagttatactgttgatttgtaaactatgtgtttatttcaagagtacgtttaagttcttaatattttggaattgttcaagttctgtttggatgcagttcatgtctccacaactaatggtactatatattcctatatttagacagtaaattggaagtggaaaaatgatagtacagggattttaaaggagaaaaaacagaacttgaatcgtttcaatactttcactgtatgtgaccacttgaattttgtgtttcaaatttgaaatagtgacacagtgtgtgagttgcaacaaataatatttcatttggtaagagaacatttaaaaatgattatacgtgcaatataattgtttagtccagaggggtgcctattacaatggttaaactaagtttgcccctcttcaggagaataatatttgggggtaattctttcccaaaatattagtgaaaattgtttgctagttcactcagcacatagttctttaggaatgaggtaacacacaagaagcagagagcaagataccaaaagggaatgtgtgtatgtgtgtacatgttgcatatgggtgcatggtgtttatgtgatcttgagataaatgtagcctattccacactttggccctgataaacataatccccattttggaaacagaaaattaagatcagattggctaacaagacttttctgagaatatttatctcagcaatacagcagtaaagggcagtcttctactagcctgtcacgtttgctgaagtttatcaaaagtgagtagaaagcacctaattctatttgatcctcctatgtgatgaaattgagtggtgaccaggatttttggtgaactgatacatttttggcatttatttgttagattgtgatttggctcagtaacttgaataaattttgtactataaaatgtagtactaactaaaaaactaaaaagccacctttcccatatgcctgtaggacatactgacaagctagttttcataaactttccaaattaaaatcataatgaataaaattataaatcaaagtagggaaatatagactgatgagcgtaaatgagcaacagcaaggctctgccatttacttgccctgtgaccttggagaatttacttcaattttccattcctgattcattaataagatgaggatcataaaaacatgtacctcattgttttttgttttaaggaataaattttacacatagatgatagataagtggatatgttggttcttagtacagtgtaagggcttaatattagctacttattataaacaatattatggtgaaatttatcttaaattcaaggccaaaagtctctatataaaaattatgcaaagatccatatttatagaataatggaataaggaagtggggtattcccatatggatccaactttgcaaagttcttttttttaatcaaaatattttatgttaagagacctttcaaaaagaccctccatgttagacatcccaacagtaccttggacctttttggggggatcttttttgtattttttttcttcttaaatcaactaaaaaattttgatgctaaaagccgggaaatattttccaatgaaaatttagtccaaaaagaaaaaaatacacacacacacacacacacacacacacacacacacacacacacgtgtgtgtatatatatatgtatttatatacatatgtgtgtatatatgtatatataatacatatatttatatacctatgtgtgtatatatgtatatataatatatttacatatcacatattttttatatataatataatgcatatatattttatcctcgtgacaggtgaggaagggcaagatgctgccaggaattcaggaggtatttggttttcttgttacatagtaaggagaatggttttgctgaagacagggacacattacattattcaaatgtaatcaacacccaacttgtatccatttgcaatgatagcaattaactaatcttgctagtgagaatttcagtgtagctggttatgaatataacatatctatgcaataatcatcaaagtattataggtagtattatgctcatcataaaatttattttgaaattttaacactatgacttgcatttttcattcctatggcctaagggaatagtaaggtttgctatcatagcatttctgatgctgatgctcttctgtttagccataactacagctcaagagagagagacagatgggacacgtagaaataatggaggtgccaagagagtcaggcttcagtagttagttaccatacagaaatggccatctccagtcccttcttccccaatatcagccatggggacttgacccccgctgggatcaaggggcctaaagacagccttgtttcctgcctgccctccttagaatggcaacaacaacaacaaaaaaagagtagcgattgggatgccataaaatgagcaaatggcagcaaggctatattaaggacatattcaatgcaaagcaccccatgtttgtcacggctcttgtttattaacaccacccagggaattgagggaatagaggtgggaaaaggaaatttaggatgtgatatagggaaggcagcattccttcttatctctctttgcttaggctgttctactgaatcatcagctctgtaccctcagtcagccacttcgagtatttcagtgccatatgagaaatctaacagcatacactacatattcatatctagagaatcgtaaatgtgtttatgtagctgcagactagcatggaggagaaatctgttctctattttttgttccatttttcctaattggattggttctgcttggacaagttgtttgtggagttagtcaataaatgtattgatgaaaaacaaaatataggttcccacttttagtttttagaatccatgagaatagagtcctttttggctgacatcagtactaataatagctatgatttgttgatagcttattgtgtgtcaaccactatgttccactagtatgaacacatttagttcttatgaaacagtgccacttgtatcccacagatgtggaaattggggtatagaacacttatactacctgcccagaatcacataactagtgagtagtgggtccagggatcagacaatttgatgtcagggtcttatgccatactgctgcatctgaacagctgtgatcatgcagctaaacgggaccttgcagaaagcaccccagcaccccaaaggctagtctaactttcttaccaatgtacctgggtccccttgtcactgtaatgttcttcagatcccacctttagtcatgcattcaacaatatttactgagcaccaacttactgtctagacacaggagatctactggacagcaattctgattcaacccatactgggtctaggactagacacaatctcactggtcctatgatactaaaaacctagttatctggcatattgaaggggcctcaagcccagtcatgagggagaccggaaggcatctcagggaagttaatgactcctgaaagatgaactgaaattagtttgttaaagaggatgtaggccggacatgatggctcatgcctgtaatcccagcactttggaaggctgaggcaggtggatcacttgaggtcaagagttcaagaccagcctggtcaacatggtgaaaccctgtctctactaaaaatacaaaaattggccaggcatgatggtgcatacctgtaatcccagctacttatgaggctaaggcacgagcatttcttgaatccgggagatgggggttacagtgagccaagattataccattgtactccagcctgggagagcgagactctgtctcaaaaaaaaaaaaaaaaaaaaaaaaagactgatgtggaaagagtattgcaagagaggtaacaagaacaggcccctgatacccaaaataagcatggcatgaatggggtactcaaagtctttcattctgtggaatcggagatgatgactgagtgagtcgggggttgcagtgcaaactgtgatctgtggcccaagtcctgactgctgtctgcttttgtatggcctgcctttttacatttttacatgattttttaaaaataagaaattgaactgtataccatgatgtgtgaaaaatatgagattcaaatttcagtgttcataaagttttattagaacatagccatacccactttattttcatgttgtatatggctactctcatgctacaatagcagagctaagtagttgcaacagagaccatagggtctacaaaacctgaaagatttgctgtctggccttttacagaaaaaaaagtgtgctgactcctgctgtagaggatgagaggttgctatagagttagatcatgaaggaccctatagttcacattgagagatttttattttgattctgaaaggcaatggggagtaactaaagggttttaagtgccttcatatttcttaggttggctgttagttaatttgcctcctttcatattttcttgtactaggttcctgggaaccgcttttacctacaatgattttgttgactctgagactgtttctggagttttctaagtcagcagtcatagcatttataggttgccccttttataatgtagaacttacctaaattgactagtttcctgttgaaagtgggactaggattcactattatccattttagactgtcaccttatgttactgctacgaaagtctaaactgtgggcttgattgtgatgttaacttctgggtcctaaagatgtgtgtgtcctcgccctctctgcagcccttcaaacacaggagaggccagtgggtattactggtcaagaatatttgttgttacccttagagaaaacactccatgcagaggaagcactgatgaaataaacacagggaaatagagaacagttgtgtccagacatctaaaatctgaaacacagaagagaaatctggagagcttgtcatagctccctaggggacaattagtctttctccaacttagcagagaggcttttttctgctacatttgacaagtgggtgagttctaatctgcatgtttattttgaaatgttgcttacccaaggattaaacatctggttgaaaagcagataggttcaaaaatctattacttgacattagtagcttaaaagattgtaacttggttcttagttgttttttttccccaaacttggaataaggtgattgtaataagttgaactgatggatcattcaatttctcttaagtgttagcatttctgaacattttcttatcgcttacctatatggtaagtgaaatcctttctcctagtacttatttgctctgggtctccatagatagagagaaagttaatgtgggtgccaatgttcatatttcccctgcatttttacagttagaatgttaaattaaactttccattctgaatttttatctactgccttccagttaggtacatctgtcaatcctgctgtgttaattttaatttttgttcttctcagttattaaaaatggagtaattttgaactgaattatttgtatttatttgaatgttggctaagcttttaatttagagcaaatttttaaatattagcaaaaaattttaaggacttctacattaaaatctcttattctggtaacagaagtcaatgattaaaacttttaacatgcagtccagaaatattacagtattttgtatcatagtgaatgaaagaatatatatgtttgcctagtaataatttccttttatattttcatataaatttatatttgaataaactgcaaatataaatcactttaaatttatgtgataagtttatatctcttttatctaaattaaagttattattactagaaagttggcatatatatttagtagtaaaataaattacattaaatatatgacatgtttatgcacatacaggtacatacatggagatatatacattcacacatataaatatatattcatcattgtatttttagcctcaaacaactgacatataatttcataaacataaattttgcaaaataaatttggggatgtgaaaccttcacttaggtcagccttttaagaggtttattgcctagtgaatcttgtgtataaattaataacattttttaaatgccagagacatgtgacttcttttcttcctttattgttactatagcagaggattcccttctgtgggtgaaagaaaatatattttgactttacagtcttttattgtgtgatcgatgttaaacttttttgtgcatattttcaacgtgatcttttcaaatctcaatgtttaacggtaaatatcctagagaaactgcaaagcaccgtctggcatatgttctgagcatattcacttgtgcttcttttttttttttttttttttgagacggagtctcgctctgttccccaggctggagtgcagtggcacaatctcggctcactgcaagctccgcctcccgggttcacgccattctcctgcctcagcctcccaagtagctgggactacaggcacccgccaccacgcctggctaatttttttgtatttttagtagagacggggtttcaccgtgttagccaggatggtctccatctcctgacctcgtcatccacccgcctcggcctcccaaagtgttcacttgtgcttctttaaaatcgaagaatcataaaaagcagagagttttcagcagtgccctctctacccctttcaagcagagccctgcactttgtctacatttctacaatgagtgctatttcatatttctttaggaaaaagtattctgatgctcgaaagtatgggaaacttctgatctacaccagtgcttctcaacctggggcaattttaagaatctcctcgccaccactggggacatttgtcaatgtctagtaatatttttgacgctacatctgggtgggtgctacaggcatctagtgggtcgaatccaaggatgctactaaacatcctatcatgcgctggacggttccactccctgctccccacaaacagagttatctgacccacaatgtcagtagtgctgaggctgagaaatcctgttgtagaccaagtacagtagttacccccttatccctggtttcacttgtagtggctttggttacttggagttaactgtggtccaagaatattacagtattttgagaaagagagagcgagaaagagagacaccacatttacataatttttattacagtttattgttataattgatctattttgttattagttattgttaatctgtgactgtgcataatttagaaattaaactttatcataggtatgtatgtataggaaaaaaaacagtatacatagggttcagtattatccatggtttcaggtgtccactggggttctggaacatatgtatgtataaactcaggagtttttccaaaacgactgtactgatttcgctgatagggaaactagacaatgaggtggagagatgtgttcaaatacacagtttattttatgctggagtccaagtcttgattttccttactttatgctgtttgtcctttacttgaggacctatgtgaaatggcaatttggatagaaaaataaaatcaccaaaatgtaaatattaaaaaataatacttggtactgcattgcatgggcttcattgcaataaatatttctctactatctagcacactgcctgtaacagagattaaaaagagtatgcttctttgcaaagagctatccagctggggagattaagagataaataattatgaatcaataagtagttagagaacaagctacagagaagaggtcatatgtaagaagggacctgaacagtaaactgaagttagtcaggtgggaaagaagagggagtgggcattcttggtaaagataactgtatgccagaggcatggaagagccgaaggccttcgtgtggtcttactaaaaattagcatgtgtgggccaggtgcggtggcttatacctgtaatcccagcactctgggaggccgaggcaggcggatcacgaggtcaggagatcgagaccatcctggctaacacggtgaaaccccgtctctactaaaaatacaaaaaatatgcgggcgtggtggcgggcgcctgtagtcccagcttctcgggaggctgaggcgggacaatggcgtgaacccgggaggcggagcttgcagtgagccgagatcacgccactgcactccgccctgggcgacagagcgagactccgtctcaaaaaaaaaaaaaaaaaaaaaaaaaattagcatgtgtggattcccgatttgcctacaacaggttacttgagggtaaatgtgggtttgggggaaaaaacctttcaccaacaaagattcccacttatgtaccatagtgcttgacgtttcactctcggaaattcttcccatttggtttaaaaatttccctttccttgccatcatctttaaggagaaaaggtatgtccagatactttatgtctctgaaagaccttcagggaacaaaatatatttatgaaaatgaaagtgactcacatggtagtaagagtcccagatggctgaggaggtaaaaatgagtacaagcagggacttgaaagtataagaaaatcttgggtggtgggcaggcacccaggtcatagatgcctaattcctacttttacagacattgagtgggcattcttgtgatattttatatttttggagctgtgtactttctttcttactttatttctttgaagttcattgcccagagaggaataagcatctttatccaatatggtaaggtatgctgcttacctgatctggtccctctgccacagaatcctgactacacagagcttgtcagtcaaaggaaatttggtgcaaatatatatttaacatatgaccatgaaggaattcctactttgtatgttataaaacacaggatcagaactgccatttgcacatttggggcatttttatgaatcatggaaaggacccctctggatgaccattgagaaaggcactgctttcacctggctcagcaacatctgtgcgaggacacatgtgctggctccagttactggcttggtgaaaagaagatggtaggatttcagacccactggtaccccctcctactaaatgcctttgtgcacaccataaactaacatggtacaaagggaccctgacaaggatgaattgagaggccataatccatattgtatatgggtaatatacacagtgtaattacatgtagagagagaccaggtgtgtgtttttctgagggcatgtctgtgtgagtccctgtgtgtacagaactatgtcaactattaacctctcacccacctcgctaggaaagtgggcaacaacccaacagatgtagctttggtaacttcttcagtcctagtctgtgtatttcctgcattggcatactttttactttaactaagccctttattactacacagaggagttcctgtgactttttctgcagtggcatcctttgtacagtgtctttatcaataccatttctaagtttagccatagtacttatatctgttttactccttcagcactctcgttaagaagcccatgctttgtctacacattacttgtctgcacagttccagtgcactgtcttcctccccaccacacccatcctgataacatcatccagtgaggtcgtggaaatagatatcttgcagccaactcttccttttgacaattcgagagactttccagcttgagtgggctctggggatagctccttacattgtttcaatgacactgaactctagataccctgatcctgtgtatcttctctaaacacatgtctttcctcaagccatttggaggtttaccatgtcaattaatattcaacaaggatttgagagcttactgtgtgccaagtcattaaccagtaaattattaaattatagacctttcacttctataattttgcagtaataaaacattctaaaaatgcccaagtattgtggtaatgcccactgatttttagttagatcaagtgattgtagaggaagttacattatgccatttgatttctcacggcgtgcttatacagtgtactatgcttatttcagtgtttcactcttgccccagtagttcaagttgcccttctgaaagctgtaataaatattcctatgttggcttttatctctttgattacagcatgttagttaacacccccagtaagtaggcgggaacttgtatgtgattgttttccttttcaccctatttatattccttcttctctttctgtgatggtgagtagagctttatttttgtttttactttacttgatctctcagtgtttcatgagatctgtgttctggtttctcagttttcacaccctgttcagccactttaaatgtcttaaatcttttgtctatgctttcataaataaacattcaaaatggttcaaaaatttaaaaaactacgaaatgctttaatcagtaaactttcataaaattgtacatacctttacatactatattaaattaaaattatattatttaacttgcaattcatatactgtaatttttataaggataatttaggagaactcaataagaaaataaatcttcagaaaattgtatcatttttgtaaagagttaccatatacctgtctttttaatgacaatttttgcaaattaatattgatatagttcatcttgatcaaaatatattgacatacaaggactatggctttagatctgttctccttttctatgagaggtggcagaacaggtttggaaatcatggcagccttcctggccagagataataacgtactacttaaccttgtacaaaatcgtcttttcctttctcgaattgaacaacaatttgaggagagtccttgatactcttgacctattatggttttacctgtttaatctgaggatttctatttcagttaggagtccagagtggaataaaattgaaaagtaagataaatgtatatcctatactggtccttacacattacagctggggcctttaattaccatatcagctaatgaagtgccatctatgtcttgaatcgagaaggttttgaccctagggaaggtgacagctcttacatttaaacctagcaccagcagagttctaacagttactcaaagatcattttctctgaggatgaagaatttaacaaagaaacaagtcctaatatcatctgctttaaaattactatgaaaagagacagagaggggaagaagaaaaaacaattacttatttaataaaaatataaggaacactgagtacatgaaagatataccagggactcaggtcaatgggaaagtcattgcactcttctgagcctcaatatttctgtcagtaatatggggatgagaggcatgtcggacagggttactgtagggatgaggggtgatatgataaagtacttggcaatccaaaacaaagccaattttggctgttattactcaataataataaatatagactaaggagattgcatttttcttgtcagcagtgggggtctattgaaggtttttgagcaggagtgactactgcagtatgccagacctcagaaactgtgggcatgttttacagagggcagaaacaatttagaagacaattgcaatattctcagcaggaagtggtaatggagaaataggatggggtagggtggggtacagagcgagaccaaaacaaggaagagtaagagaaatatcaaagtcacaaaatcaaaggtattgcagccccttttgtgaggccagatggggaattgggacaataacagagacattaacaagaacagaaaacactggtcaggagtgggcattcaggggagaggagaaagtggaatgagctctgatttggacatagtaaggtcaagaatggcactgattggctgctaacactggactggtcatttttccccagagtagagcttggtgaggaaaaatcccgatacttgtccctcttgaattctgaaacccgaaatgatgttttctgaatcatcctgcagaattggtgggaagacgttaggcactgtatctttgagcctgtcagcttctgcctgattaattctgagtagttacatttcttctaaaccattattaaaaaaaaaaatggatgagacttcacagttgccttatcatatgaagatgaaaagtacatccttccgtaatgttgctattgcttttatccacgttacaactaatgattcaatctcacatatttcatatttaaaaatactatatttctaatatgcttacactgaattagtggctcaaacctttataagaaagtgcttacacctattttgaactgtctaggaatatgcatgaaggacagatctttctgtttgtaggaagaaatgttatatttgttagtcatgacagagggattgtgaatagaagtgtttccatttccacccagtggagagtgtttcgagtggtgggagacacgttatacctggtgagaacattgaggttaaacattttatttttattacctcaattctttttaataaggatgccacagaggtgtttgcagggcctgtaaattagttttggccacaagccaatcagctttcaaacctggtgtaagaggagaaagtagatgtgtgtatgtttgtgtgtgtgatgtgtgtctgtgtgttgtgtgtgcatatgagctgtctgtgaatgtacatattcctgcttagtgatataaacatcctctactttcagagaaaagtctaggtagacttaataccccacatgaatatttccattattttttgttttccttttcaatttgagctattgtttatccacaggctttatgagctgaatgtatttttagcaaaggaatgcctttttgcatgaaacacaaccatatacagtgctgctagctgaacaagaggaaaagaaatgttggattattcataaaatgcgctcattttctcctttttgttttaaaggctagatattgtttctaaagtagtggtatacaaaagtaggcactccatgtacttactttggctttgtgtagctgtaaagtggaatgatatctccagcttagttttaactttgtttgaaatgagaaaacctatggcagtctctcaactgatattatttgatttattccttatttttgtctggtgggaatgagaatgggatgaagataaagtggtttcaagactattgttgacactgcattttgctcaatggtgttgcctcatctcttctgctattactttgcttggattccagatatgctggaggaggaaaaagtacttggtttctatgctctcatctgattaatagcttttgaacttgaactggcctgatttctctctttctcctctgcccaatcccagaaggcagaagggaggaactgagataaaatagctaaatacaaaagacaaccgagtatatcgcaggtcttcataactttccctaataatggcaattgtttagtctttcctatgtcatatttttttctcattttgttgcaaataagaattggaatgggtatatacaaataaggtagaaagcagaaaagaccctgacttttgcatagctcatcagaacactgtagattattaattaagaacagggattggagaacttttttttctgtaaagggtcagatagtgaatattttatgctttgttggctgtatagtttctgttgtggctgctcaactcggctgttgtggggagcagctacagacaatatgtaaacgaataggtgtgactgtgttcccatataacttatttatggacaattaaatttgaatttcatactagtttctggtgtcatggatcattattctttgaattttttagccatttaaaaagatagatagcattctttactcataagccaagttagaaacaaggggtgggctacttttcactcagagctatagtttgccaactacaggataaaaagaaagaacattatactgttcatgaggcattgataaaactgacaataactgcatttattgagcacttactatatctgaggcattgtgctgactactttatatgtcatcttaatcaacctgtaaagcaattctgtattagacattattagctcgatctttagtgaactaattgaagctcagagaagttgaaaaactttccaaatatcacactgtttggagagtcaaaagatttatgttcagctcctaccaagcaatgcaactctagaaaaaaccctttgcttccttggattttcgtctcttcatctgtaaaatggatgtaccattcttactttcattgccatgcagttgggctgaggcttatgtaattctcaaagctctaaacagctgtgcagctttagaaaattattattaagactatcagagtaatgtatgtattaagttgttttttcctctagctgtaacatcctacatcaattaatattattatctaattgcgaaggaaaaatcattccccaaatccttgggatgaggcagtaggatgaggcaatatgtcaacaaatgaaagagtgtaaattcattatgcaattggtaaggagagacactaagggagagtgaagaatggcagaaatcagaaaaaaaattatagtcaggtaaagcagcttttaaagaataagatgagctggccatggcataggtatattaataatgtatattaaagaatcaaaaatatttctgattgcaaatttctactattggcatgtataattgagtcataccatacttgtttttgaaatttgaaagaatttgtggatgcagtcttaaggataatatttaagatctaatggataaattaagtatagacccaaagctctagatttgccataattttcacaaaataagaatacgttaattctagaaactgggattggtatgcctaattaagatgcctagcaatattcatcaacagatttttaaacagcatgtatgtgagtcctcaggggaaaaactcactggtatccaacctgggctttctttacaatgaaaagaaaaggaaataaataaatttagttaaaattgatttctctttataaagtggacttttaaaacattgaatcatgctatgcttattgaatatcatggcaaaaatcattgaataaaatgttgggtcagattcttggttcatttctctttaacaatctgagatagcaattctaatacagttccacaatttatcacattcccttgaatcatttggtcgttctaaaaatatttagcagccgggaactgtggcttatgcctgtaatcccatctactcgggaggctgaggtgggaaggtcgcttgaggccaggagtttgaggttgcagtgagctgtgatcatgccactgcactccagcctgggtgacagcaagagtaaaaaataaataaaattttaaaagagcattaagaacctgttctgtgctgggaattgctaaaattgcatgcagtatgttggtaaacaaaactcacccaaatccctgccctcatgggaattacatcactccagtactggttctgctgcttcccagctctaccaggggttcccacagcctttgttgctagtcacttcctgtgacacagtggtcttgataggacactgcacttgggcaccaatagaaaggtaagcagggaggtagataaatttccactgaattccctgttcatttaaatttttaccattactgtagagaggcttgtaaggcttgacagaagggctggctcagttgaagaaaattagtgtgtgggataggataaaaactttagaaaagtacattaattattacttacgcccaaggtgaaatgaaaagcacccaagaatttaaattctacctaggagcccctcattgatttctttgcttatctgccctgctcccttgcctgaatttactcatatgtctttatgtacgaacacaaaaagctctcccttcctctgggtgatccttgacatgggctttacgaagtagagcaagaactgaattccaccctgcttgtccctccacctggtgcctttgtgtatggcacaacctgctctactctagcatacagccttgcctttcctccaacagggctcatttccaaacatgagttatacacactggactagagctccagagttccttcaagacagtccatgcaactgtccgggcagttctagagatctgctccacaatgacgggcacataattaatactacagtactgaacacttaacaattattgagatgatatatttaacattatgtgttgtttaaccacaactttaaaaaaaaaaagctgtatagggcaagtgtggagtcaaggaggttgcttcccactggagaattgcagtcatgctatttattttctcagtttgtcttcctgatctcaattctattagacatgtactgacttctcagtgataaaatatggctatcatagattatgctggctcaacctaagaagaaagagcaataactttctaactaccgctttcctatcaatgtacaggcaaatgtgcattccatgtgtgtctcaatgcccaatctttcacccagctgaacttcaaaccatcactgttaggggcctaattacattcttagattttgactatcaatcatcttcaaggatatctgtgtagggcactgggggtaaggtggagagaaagctttcatttatccagtcatgacaggatgacatctgaattgtgatagataagaaactccttgaattctttattaatctgtccacttttgaaacattaattacagctctgttttttgtataaattataaaggatgttaatcaactagcatggcatgcattcttagaagggcaagtgtttagggaaagatcctaaaaaccacagagaaggacgagcgcggtagctcacgcctataatcccagcactttgggaggccaaggcgggcaggtcacctgaggtcaggagtttgaaaccagcctggccaacatggtgaaaccccgtctctactaaaaataccaaaaaaaaaaaaaaaaaaaattaaccaggcgtggtggtggatgcctgtaatcccaggtacttgggaggctgaggcaggagaatcgcttgaacacgggaggcagaggttgcagtgagcgaagatcatgccattgcactccagcctgggcaacaagagcaaaattccgtcaaaaaaaaaaaaaaaaaaaaaaaacccacagaggaagagttaaggatctaggggtatttagcttgaagaaagaggatgaaggaacgccttgctaacatctgcagatatttgaaggactgtcatggaaaagcactgtagaattgttctgcctttctttatatggtagatctaggaccaacgaacagaaatacagacaggtagatttgggggcagtacagtaaagaatcttccaatgaataaagctattcaaaaaatgaaacagtactttcagatttaagatgacaaaagcaacaaaaaggaaaccaaactccaactatgatgaaatcaggggacatctatagtctcaaaccacagtatacatataagggtaagcaatggatgcagaaacagcaaatgacttcacagtgtgggaacactgatgagaagctacatctctcccacaaaacctgagaaaggcttaggaattaaattcatcaattagaggaaatgcttggagggaggggactaaatatgaaacttggtaaaaagaaatatatgtataaatatggagccattggaccgtcaggacccattgctaacccactgaatgcccagaaaagtgagtgacccacatcaatatatactaggatagatacgtctaatatcaagcataagtagaagatcctgagatagagaccaggttacctaaaaaagctctagagtaagaattacatccaacgtatcaatgctgacaaagtgcaatcacgatttcaaaatttggaccaaaaataaatttcatcattgaattttatatacagccagttaatcgactataaggattgaaaaaaaaaaggcattttcagacaatatcttccccctgttaggaagccacagggatatgctccacctagatgacgtagtgaactaattaagaacaaaattgggtgtacagggccagggtggagttgtgggagagggcaggatgggaacactcagatgacagcaaaaggaagacttttaaaaatttttttgccaatacaccaacaatttattttaattttattttatgtcattgatttattatttatttattttccttcaacttttaagttcaggggtacacatccagatgtgccggtttgttacataggtaaacatgtgccacggtggtttgctgcacagatcattccagcacctcagtgttgcatccatgcctggcatccattagctatgtaagctatgtaagcccagcatccattagctattcttcctgatggtctcccttcccccacactcccctccaacaagccccattgtttgttgtccatgtgttctcatcgttcagctcccactgataagtgacaacatgtgatgtttggttttctgttcctgcattagtttgctgaggttaatggtagtcttaaggctgaagggatatggcagccctagggaacggcagttcacagtgaactctggtggtcagggagctccaggaggggtgtcctgggaatacacaaacataggatattctggtattttatgagaattttacacagccgttgaagagtgtaggaagacttagccaatagttgcaagaaaatcaaattttaacaggaggtaccaattgactgcagggaaaaaaataagatgtacaagaaaaaatgtagtcatgttacttgtatcagaaacaaacaaaaaacattgacaaaggcatgaagacactgaaagtggttggaaaaataattgtgctttaatgttggaaggaaaaaaggtgctgaaattttcatcattgtaataagaagtcataggggacatctaagattgaataattaagggatatagtatatacataggacatagcaaatataaatatgaataccagaagaaacaattttaataaatgaaagccatttctatttgtgtatgagccctggagaaggaaagagaattatacaagagactgctgtttttggtgtaagacttttggcactatttaaatttttaaatttttaactatgtaagtatcttattttgataaaagtaaacattcattggatggaaagaaactccacaggctaccttggaaataagtcagcttcctgatttagaaagattcatgcagaagtttccttccatcactttttctcagttttgttaggtgtccttcgacttttaatcactgtgaagaaatagcgaaaggcatgacttttggtactgtcttctccagtcaacctgaggcactgtgggattgctaaaggaagtgtggttcaggctgcatgaaagcagtctgggtatgctaggccagggaggaggcagccacagcagcggccaagagaagccactggagggattcctaggtggctggagcttgacccgatcattcctaagattccattgtcctgagccatctaaacagcagtgtctgctattctataatgactctgattccagaactgaactgaccaccactggtcacatggtaggaaaaaattaggtgtaaatgtggtcaaaatataacagaaagtgaggggcagaaaaacagttgaagtgtcagaattagtgataaggtgggtatctagggatagcaggccagggggtagggccaacgtcagagactgtatgggacatagttgtgtcaaagcatggagagagtgaatgctgcttcatggacttaaaagtggaacctacctttcactctgtaatatgtgccactgggggacctaagtcagcagagtcgttatcatttttgtagagccttgaagtcccagatagttaggtgtatccctgttaggtggatagctctcccaggactgagatttcctgcaacctcttgaagaccatatggctttagaacttctggataaactcttgggtcaggtttgatctttggggaatgcttttgtttacataaaagggaaaagaaaaaagtcagcagatgtgataacttcctatagtaatagtgtttcccttgcaggcaactacatactctgatttcctctttgatacgacttttattacttctcaaatgaagttaacaagtacgtttatgagatatctggcctagcttcataaaagaattttctcttttcttaaaaataaaaactaacagagattggaatgatcatattcagtatattgtgagcatatgagagacttataatatgcttagcataaaatttgacactattaataaattaattattgatgaaattggttcattagttctaaaaattttatttcctctgactcaggtaataaacagaaataaaaatgatctgctccccactttattccactttagaattcttgccacatttattcattagtttgagaggtcatgtaattccggctgtgccttaaagatgaagcctccagaaatgaattttatctaaaaattagacctcacttgaacagaagacatatctctttccctttggattacccttgttgtcttctttgttggtttataaaaaatagattaagaccgtatatacacatcgaaagagtagccatcatatttattttattgcaagtaaatatgctgatgtatagcaaagatttttatctacaatgcctgatgctttcaataggagagttggtaaatgtacagcaaatatttaaggcacctttttcccacttgtttttttttttttgtggtggtggtggtgattgttgtttgacctgttttaataaggacagttaaatacctgtgattaaatagttgtttgatttttttcattcaatttttatttctgatacagggggtacatgtacaggtttgttacatgggtatattgcttccaggtagtgagcatggtatgcaataagtagtttttcaactcatccttcctcccgcccttcctcctcgctctagtcgtttacagcatctattgctgccatgtttatgtttatatgtgcttagtgtttagctcccccttataagtgagaacatgcagtatttggttaattcacttaagattatgttaattcactgtccctgtgttaattcccttaggattatggcctccagctctatacatgttgcttgaaggacaggatttcattgtttttatgactatataatattcatggtgtgtatgtaccacattttctttatccaatccaccattaatggacacctaggttgattccatgatgttgctgttgtgaacagtgcagtgatgaacatatgcatgtgcgtgtctttttggtacaatgatttattttcctttcagtatataaccagtaatggggttgctctattttacattatttgggaaatctccaaactgctttctacagtggctgaactaattgatattcccaccaacagtgcataagcattctcttttatccgcagcctcaccagtttctgttgttttttgactttttaataatagccattctgactggtatgagatgttatctcattatggtgttgatttgcatttctacgatgattaatgatgatgacaattttttaatatgtttgttggctgcttgtatgtcttcttttgagaagtatctgttcatgtcctttgcccgttttaatgcggttatttgtgctttgcttgttggtttaacttccttatgtattctggatactagacctttgtcagatgcatagtttgcagatattttctcccattctattagctgcctgtttactctatctactgtttcttttgctgtgcagaagctctttagtttaattaggccccacttgtcaatttttgtttttgttgcaatcacttttggggacttagccaaaaattctttgccaaggccaatgttgagaagggtatttcctagattttcttctagaatttttatagtttgtgatcttacatttcaatctttagtccatcttaagttaatttttgtatgtggtgaaaggtgagagtccaatttcattcttttgcatatggctagccagttatcccagcaccatttattgaataaggggtcctttccccattgcttgcttttgttgaccttgaggaagatcagatgattgtaagtgtgccattttattttggagttttctattctgttccattggtcaatgtgtctgtttttgtaccagtaccgtgctggtttggttactatagccttatagtatagtttgaagtcaggtagtgtaatgcctctggctttgttctttttgcttaggattgcttaggcaattcagactcttttttggttccatattacttaaaaatttttttttctaattctgtgaagtatgatattagtactttgctagaaatatcattgaacctctaattgctttaggcactatggtcattttaacaaaattaattcttccaatctataaacatggaacgcttttcatttattcgtgttttctctgaattctgtcagcagttttgtagttctttttgtagggaaccttcaccttcttggttagttgtattttcaggtatttcattttctttgtgactttgtaaatagcagtgtgttcttgatttgactttcagcatggacaccattggtatatagaaatgctactttttttgtacatatccaggaaccttgctaaacctgtttatcagttctaatagctttttcacagagtctttagggttttctagatatagaatcatatcttcagggaagatagttttatttcttttcctatttggatgcttttctttctcttccctattgctctgtctaggacttatttcccactttgttttaacaccatacaaaagcttagggaaggaaaggccaaatggaatagtgtacttatatgtgttttataaaaagaacatcatgtataaattaatatggggtttaagagccaaaatttatactttaaattatcattggcccagaaaagtatgattttttttttttttaaatcacatcatgcttcttgttcaggcggaaatctcaaccattaagctcagttcatgtagtttgcagtttggtattttttgtattttgtgtctagagacttctgctctgcatatgtcttagtctgttttttgttgctataacagagtatcacagactgggtaatttataaagaaagtaaatgtatttcttacacttcttctgggaagtccaagatagaagatctggcatctggtgagggccttcttgctgtgtcataaaatggcagaaggcatcacatgttgagagagcaaaagtatgcttctcagatcaagtctctctttctcttcttacaaggccaccagtcctaaaatgggggctccatccagattaccttatctaatcctaattacctcccatttccaatcaacatatgaatttggagattatgtttccaacacatgaaatgtgggggacatattcaaatcctagcagcctgtacgcttcatatcattgccagacctactttgccttactgtttataaattgcttgcagatagaaatggtattatctatgcacaaacacacacatacttatccctgaatatcatctaataaaatcactttctttgtaattggtactaaataatttggactgctatcaaaaccttttaatatagcagctcttctactgaatatgttcgaatttggttctcaaatcagaggaagtcctcattattagaaaagtgtactgccaccattgtgcattatggttttcaatttaataaatttgaatgaaaatctgaaacaatagcaatgtttttgaaaatgtattatgtaatacagtggaaaatgttttctgtttttacaataatagaataaataccgtgcagatgggcttgaatttaaataagaacaaagaaataagaaaaaaaatgaagcgtgtttataatatttctcaatattttacttttcaaatgaactttctgcagcagaattacacttgaatttgattcaattttctaaaaactgaattacataaatatttggaaggagcatgtgtcaccactgattcattcattcagcttacattttttgaacacccactgtggttcacgctctttgtaaggctggggacatataatgatgagcaacataggcatgggctcatcatcaataagcaggcagaacatatttaacgtatttcatatttgttttattaagccaaatatgaaaatgggccagccaaaagtgtgagggggtgaaatgggcttaattgtattgtctgatgtggcagccttggttggatttgttttgttggaggaaaagaatctaaggaagggatgaacttgctcacagaaatgtacgttcagttaacatgaacaggtgattagaggaagtgttaacctggggtctagagtggttagcaattactttagtaatatataatgcttctgacagatctcacaggatctctgatatcggagattatctaacccaactcctgaagtctttcctgaccacctgtttaaaagagccctcctctcttctattctgtctcacagtacactttttcctttatctcactggttcagatttgtgtaacttatttattacagtttacttctttaatgtttttgcccccaccactagacggaattgctacaaggacatgaactatgtctgttttgttcacctgagtagagtcattgcctgtgtcctaattggtccacaggcaaagtaggtgatcaataaatatttattaatgactgcaaaatcagtttctaaatgtaaacatccaggttgtgacagatcatgattatgtagttgagagttgtgttattttggattgctatgctgtgttttactttaggatctttagcatttctacaaaagtgaaccacctttttatttttattttgaaggagattatatttcatataaagcaaaatgaaggtaagtaaatatggtgaaataagaaagcgaaagagtaagagaaaatattgcaagatttataaaaatactttatttttttaagttttgctttagtatttccataagaaaagttttctgcctaagaaacaagcagttaggtgagtgtctttcctaccccctatagacctgcgtagttcatctcactactcctgcacaagtcctattggtcctggagaaaatggatggctttagagaaaaattaaaaggtttagaccagggatctctaaaaaatctactattttctttggcaatactttctcatttgtgaagaggaacttttcagttgcattgtttatgaagaggcatttccaaatgtaaattgcttttccctactggtatcagtgtagctattgggagttaaaacatgcttgatacatgttaggatgttaatatcttactctttctttgaactcagaagacagctatgccactcatcaaccgactacctcttcatgagctacatctgcatatactctggttctatgcagaagtctaggcctgtttataacaggaagatcttggatggattaaaggcagaatccccatgtagctttcagatcagtcataatagaatcttaagcataatcgaatcagtaagcattctgaaacatgagctctaccttatagattagggaactgagtcttgctgatcatacatatggtactttctgtccaggaaatgaatatatgtgagttctagcatttctccccaccccccgctctaatggttcgatttttagaactgatcttttgattcattttccctgcatcttttctattagtgctgaagtttgtctctatactaattcctaagggaatgaggcctgaaggccagttgcattcctgcctgtgtcttttcctgcctggatgagaaaacttgaatcctgcctctagatccctcagctactgccttggtcttgcgtctgatgcacatattgctctgactcatcatgacttcagcaccaactgttttgtctacagtatcagcagtctggaattcctcaaccaccatctcagttctggactgcctcgttggatgttactgatgttgacacttgagaagctggtttcaccagccaaatgtggagcatcatagtgcctaatagcttctggtggccttaacttccttctccagttggtttccttcaggtttttttccattttcttcttttggctctgggtttggtctagtatgcttgttcatattgtgacaagtgacacctttgggaaaaaaacaatacaaaacaaaacaaagaaactgcaagaagttccctacaagaagaccccaaaatgcgtgttagggtttgatgctctgtgcattccaggagatgtgttcatttaatttttgctttagttggtggtttctctaggaaccttcatgaacaacaggaggatggtctgctgttctcagataataaagggattgagtggactcagtattagccactcaagatgttcatgttcaatgctagcgccactttaaagaaataatgggctggcgcggtggctcacgcctgtaaccccagtactttgggaggctgaggcggtcgcatcaggaggtcaggagatcaagaccatcctggctaacacggtgaaaccctgtctctactaaaaatacaaaaaattagctgggtgtggtcgtgggcgcctgtagtcccagctactttggaggctgaggcaggagaatggcgtgaacctgggaggcggagcttgcagtgagccaagatcatgccactgcattccagccggggcgacagaccaagactccacctcaaaaaaaaaaaaaaaaaaaaaaggaaaagaaaaaagaaataatgagtgagttatgacttagaggcttgtctgcagcacatcagcacgtctactctgcggtactccctggtctttaccctgctcttgactttctgcctttctcctgcaagtagcatactacttgtagcatgtcacagcaagtaggagctgtagaaaagccttggtccagcactctcattgcatatgttttatattttgtagaatttaggtccatagagggagctacataagctttcattgtaattaagtttgtgatttcaattccatgatgatatatgtctttcagattaagcttaccaaaatactcattctacctgagtttatatcatgaaacagaacatctctgtctaaattgttaaaatctatttgatatttaaacataaaataaaagatgatcaggcccagatggtatggtagagaaactcatatctggctacaaaccctggctgcgctactgacttctatgtgactttaagcaagaattcattgaatgttacttcccctctttgacataggttaataccattgttcaagacagttgtgcaaattgagagaaagcatagtaagtgcctatcaaaaaatccatcacaaagcacatgctccaagagtgttctttgcttactggagaagggacactgttgaatattcacttacatctttctaacattcaaatcttaatgataaagggataacataaagcttggctttgggtaagttctgagagtttttttggatctcataactatactcattcaaggatcaataaaatctaatcatgtccttactataaaagactgtctcttgtcatttcctgtcctctttttccatccttcttcacatttttatttctttctaaattgtcagtgcatgcaccttaaaaccttgaagatgctccccagttcctttctacaaaaactttaccacccatagattttttccatagatcatttataatccctctttctcctgctgcctgcctccagcatctgttctatgagtccaggaggaagtaattgaaacacagtgagtgaatgatgagagtccactgatcttactaaggaaatgcatgtgaatccggctgtctgggcatttgtccctctgccaggtgaccttaggtctgcagatgtccaaatacagggtgtgagattgagctaatttggatttaggcacatcggccatataaaatttagccagcagtttgcaattcaccaggcatagcctttttctaaatctgttttcatttctagaagacaaattttaacctttgacactagattggtgtaatcctagttattagaaaacactgaaatggacttctgttgaatttcatgttcacatctacacagctttcttttggtccatcagtcaatagatagatagagatatgaatgtatgtgtatatataatatatatgttatatttcatttgtactattatagtttgtgttttaagtagtttgtggtttaatgcagaagtccccaaccccggggtcatggaccagtacctgtccgtggcctgttaggagcccacagcaggaggtgagtggtgggcaagtgagcgttaccacctgagctccgcctcctgtcagagcagtgggggcattagattctcataccagcacgaaccctattgtgatttgcacatgtgaaggatctaggttgcatgctccttataataacaaatgcctgatgatctgaggtggagcagtttcatcctgaaaccatccctcctccctccgacacattcccccggtggaaaaattgttgcccatgaaactggtccctggtgccagaaaggttagggaccgctggtgtaatgggagaataataatgtacactttacagatcaaaataataatatttcagtatatgatgtaactatttctttggaaaacaaggcaatattttaaaatggggtagagagattctatctgcctattggcatagttaggttgattgatttacttataaaatgatggttagaacatgaggaaatatatcagacttcagactacatattaggttttggatttgttattgttggttaaaaaaattccttggctataaaaagtgagtcggttttaaatagtctaattaggcaatcactgtgttgcttatctgcattcacaaacagcaaatgaaaaccggaagtgactacatgttgcttaattagtccaattaaacacctgccttagacttccttgcttagcaaacccaagacttctcaaaatcactagcacattgctaaaaatatgactttaatttgaaaaattgttttgcacattctgtatgaaaaatgtaaagaaaatacatgggaattatgcattgcttaaaacaaaagattagactttgtaattaagctaatttagtggtactatacaaatatattcagattgaaagcttgttaaaaacacatgaaaaccaaagaaagtgtacatatgaagaaaagcatggcatgtgttgaggaattccatcaaatacttggatgaaagacagcagtggtcctcagatcagcaggactccctgtaaaccccagaatggcttcagcttagccacctaaatgacttggaaagataccagaaaaggagatctctgatattcttttgtgaatccctcttaattttgacgtaaaaattcattgaaaatcaatactatcccatttattttagtctatctcagtggatacagagaacagatttcagatatttctttttttattttattttattttattattattatactttaagttttagggtacctgtgcacaatgtgcaggttagttacatatgtatacatgtgccatgctggtgtcctgcacccattaactcgtcatttagcattaggtatatctcctaaagctatccctcccccctccccccaccccacaacggtccccagagtgtgatgttccccttcctgtgtccatgtgttctcattgttcaattcccacatatgagtgagaatatgcagtgtttggttttttgttcttgcgatagtttactgtgaatgatgatttccagtttcatccatgtccctacaaaggacatgaactcatcattttttatggctgcatagtattccatggtgtttatgtgccacattttcttaatccagtctatcattgttggacatttgggttggttccaagtctttgctattgtgaatagtgccacagtaaacatacttgtgcatgtgtctttatagcagcatgatttgtaatcctttgggtatatacccagtaatgggattgctgggtcaaatggtatttctagttctagatccctgaggaatcaccacactgacttccacaatggttgaactagtttacagtcccaccaacagtgtaaaagtgttcctatttctccacatcctctccagcacctgttgtttcctgactttttaatgatcgccattctaactggtgtgagatggtatctcattgtggttttgatttgcatttctctgatggccagtgatgatgagcattttttcactgtatcttttggctgcataaatgtcttgttttgagaagtgtctgttgatatccttcacccactttttgatgaggttgtttgtttttttcttgtaaatttgagttcattgtagattctggataatagccctttgtcagatgagtagattgcgaaaattgtctcccattttgtaggttgcctgttcactctggtggtagtttcttttgctgtgcagaagctctttagtttaattagatcccatttgtcaattttggcttttgttgccattgcttttggtgtttcagacatgaagtccttgtccatgcctatgtcctgaatggtaatgcctaggttttcttatagggtttttgtggttttaggtctaatgcttaagtctttaatccatcttgaattaatttttgtataaggtgtaaggaagggatccagtttcagctttctccatatggctagccagttttcccagcaccatatattaaatagggaatcctttccccattgcttgtttctctcaggtttgtcaaagatcagatagttgtagatatgcggcgttattttctgagggctctgttctgttccattgatctatatctctgttttggtaccagtaccatgctgttttggttactgtagccttgtagtatagtttgaagtcaggtagcgtgatgctatataaaacttaccatcatgaaccaggagtcaagaattttattttattagcacatagaatgtagaaatttgaagtaacttaaggataatttttaatttatagctgacaaaaatgaagcccaaagagattaattgaactcaattttatacagcgaataagtggctggtctggggctcaagttcaattattctgacctcatgtccggcaccctttccccttgtggttgtatgttcaatattatttgttgaagcattcctttggctacagagctaagttccttaaataaactgtcttacttaagcctcacagcatccctttaaggtgtatattattgtcttcacttttcagaatgggaagctgagtctcagattcaatcatttggcacctaagtaagaaatgggaagttccaaattctgtattgtttctgtcccctgacccgtgctgcttcctctcactgacatttcactctgcagtattgaatgcttccatactaattatccagggcccattctgcaatttcagaaatgctaataccagttttaaaaagaaataatatcctgaattagaaaatgagctgctttctttttttgtgtgaattgtccaaataaaggttcacaagaagaaccttgacaagcataattgcaacctgttcatttcccctttaagtcatcaaacattcccgagaagcttgaggcctctaagaagtgatgcttaaggaatgcagcttgacaatatggcagtgcattcaagtggaaggctggctattctatccatgaagatgaccctacagtaaaataccagtgtggccttttttcatgtcactggcattttaccagcagtttgtaatttaatggaagaataataatgtacacttacacatcaaaatcagaaaatgtcagtgtatgatgtaattgtttctttgaaaaacaagggaatgtttttaaaatggagtatgtcctgcatactgtaataaaattatgcagccacatcagttgtcttgccataaaaccaattgattttagttttaaaaatttgtattatatgtaaaatgagacaaatatgtgctgatcattatcttagggtaataaaccacaagtgtcggacaaattaaaacctgaattattattctttgataggctttatgacttctggcaggcaaattgctcaaagctttgattttcttatctgagtaatagggataatacttttatttccttgttctcacaaacatgtgctatatgtgtaatgagctgagcatacctggagaacacttagtatttaacattctattaagcaaagagcaaggtggcattattaatcatggtttattttaattctagagtagaaactaatgaacaatagaaggatgagattttgttgagatttttctgcttctaatttttggaaaaaactgtttttatatatgctaatggagagatttttttttcttagaacttagtaggcttgtgttaaacttatctccctgtggctttcaagtataattttcttcataggagactagtattgttggttttattccaagaaatgctaatggattatttatatttttcattttagtattaattccagctattaatttttgagcttattaagaatctaaagctccttttcattatttctaaaagtagcttgaaattcacattttcagcatatcatagttaccatgatttgataaagtatttttaaaaatatgtgtcatatgacaaaaccatgaaactcaaggtagagtgtactcacatacgtacatacacaggacacaaatataggctagaattcctttcatgctacagagagagagacaaagggagaccaaaaaataaataaataaaaaacaaatttagtggttactacaaaaaaaatgagaaaaatgaataaatcatttttatttgatgcaatgaggtttatatccatactttcctgcttggatgtttctttcaagaaatttaaaagaaattaatatcaaggaaactaatatcaaagaagaataaagaaattaatatcaaacactgttactttttaaggtcagtgtcacttaagctataatttcccatatcaaaatatgggtttgtttgtttgtttacattactagaaattttctttgtttcaaaatgtgttacttttgattgttgcctttacccgctatacttagtaggaacaaatactagcttcagccaatgaagtaagaatagacagggcatagtgataaagtacttgaatctcctgtgtttcaacgatgattttgatgatttttcattgatgatttagacttgtttattgaagtgtggtctcagggagccctgtactctcgagtcatctacagttttaccaaatgtggttgatatctgttttctgaaaaactttttctgacttctgaaactgactaatgtgtttttctgtatcctgaattaaaactgattgataatccctctgcaaaacccatacaggtataaaagacaaggagatgtgatagcttgtggctacccaccagaactatttgtgctagagagatgtgagttcgcttacatgttgggttttgcttatcattttcatccaaaagaaaaggatacattgagatgcgtgtgagtggatagaaatagaaaattcattgctagtggaggcttggtaaggattttagtgagtggaaaatctggctggttgtccgtgaggttcatttgggctggaagtattgagggagatgatcagacatttgagatatctttaaagcatttggcaatagcccttaatgtgctctcaagttgagaaagtggcaggaaaatatttattctacaactttatttttgttttttttttttaccatcaaatgcagtttgtctctttaagagcaaaaataaatattcagacagagtttctcagttagcagaaatcactcattttctcctaaaatgacattaaaaagagtaaaagcttgtaaagtcctcaagtaacattaaaaaaaatttataaatacattggactatatacataccgactatatctacctgtttttgtaagcttatttaaaatgtctatactagtgtcataatttactaaagccattaactgactgtttgaaatttcattctcaataattctttttagagtcagtagttgggtttttaccataagaaaaagtttgaaatctgacgtgaaaaacttcagatttgtgatgtttgtctccatgttgtttgttttctgctctgagagatgccaacaagtggcaattgagttattcccaggtcattgaaaagtgaagagaatggatttctagaactgtataagaacaaggacttgacgatttaaaattttttcatataaaaaatgggaatttgttcctagcaattcatagaaaaaagtgtgtgaaagccacctaaaaagcacgagactggcatgcaaagctttatctgccaaatgttataatagaaatattttcataataacataaaacagtaaaacaacaaaaagtttgtatatgtctctgtatgcatacaaatagagaatgtatgtgttatttatttttctaaatgagcatacattcctgaactaataatgtattacatacattatacaatatacataaaagtagacatttaaaagaatggcatacacttttaaaaacaacattctatttgttaactgtatacgatgatacagttaatattagctgctgtaatagagtatctttaaaatctcagagacttaacagaagttttcttcttactacataatatctaaatgggtctttctgatccataggtcactctcctccaagggaaacttcaggaagttaggctcctttctacctgtggcttcttcgtctttaacacctggcttccatgtttgccagttgggagaaaacaaaaaacaaaaaacaaaaaacaaaatggaggttgattttaatgagccagattgagaagaacacacagcactcactgatgctcacatttcattggctagaatttgtcaattgaccgcatcaacttcaaacgagagtgaaaaatatagtctcacattgtgtccacaggaaaaagaagcgggttcgctggtggcacccagcagtcttctccactaacaattacaaatataataagtttgctttttgctaagaatgaaaatcaacaaatatatctcaaatagctacatttgctggtgttttttctttttaaagatttgcaagtcataattgcttataccatcatgagctaatatcttaaggacactgggatgagattcactgtcagcaataatagatgtaaatacatattttaacttctcagctctgatgagactatatgttttttcagcctcataactagttgacaaagagcttgtattatgaataaaggcagtgtcagctatgtgttttcttatagtttacttatgcttgtatttttagtactatcttcaatctccagtttatagtcttttaaagcctgttccattctgtgcataggtgtgtgtgtgtgtgcaagtgtgtgtgaaaactagaaaatttaagacttaaacccacttaccaggcacgcattaaagtataagttcatccctgcaattcctgaatttgtgggaacttacccttccctcaagataccccatttatcacatgtgacatgtgaccatctaacatagggatgggtggtggtacaagtgtaagtccttacatgaaacagtagtcaggatacattgttttatatttttagacaaaaatcaatatagagtcctcatatttttcctgcatctcaccatcgactactccctatagagtatgtgcaccctgtgctggagtccactaaccttaaagaaagaaaatgtcaaacctcgtgttcatgtcaatcaaagagtgcaataaaaagatgatgaatgttgggataatgggaatttgggtaaacagaatcctttgcctaacatactattgattggaaaatattttgtgtctattgtgctttcagatttgtttctactctttcttggaacagtctagctttactttgtttcattttgttttaaccttagtaaatgcaaaatagtgattcatcaatggaattgaatttttaatttctagggacattccaaacagctttcctgagatgggcactgatccttaaaatattttggaatttgaaaaagaggaatgccttcttacccatttaaaatccctggttctaagcaattgtttcttcagtgaatatctggcattattttagtgtcttaatttttagtgtcacttttcaatggctgtaagtgtagacattgaaagttgtatagattttaggataacctaggttggcaatagatcctttaaaccagtttgtttcttttcattgcttggtttattgtgttttatcaaatcaaagatgccatcaactgtaagatatatattttagatactctaagagaaaaattaagttctatcaaatatatctttaaaatgacataaattgtaagactcattcttattttgtatatgttaaactgtggtaaaaatgtataccttagaattaatgaaatacaaagtattctactgtcttccagcaaaggtttcaggaaactttaaggatatataaagtgcagaaagattaaaacatcttaagggaaaatgcttttaagaaagcaagatgaatgtagcacaaataagagccaggattgagactaatttggtaataatcatcattacgtcatatgccttcctgaagggagcataaatttgggtgaaactgttttgaagtcagtacaaaaaggaaaaggaaatcttaatttattatgcagcttaaaatcataaagtaaaatcaaaccagtttctaagaggaagtatcaatttccttggtaatgaacaaaaatttatgtaatgtgagcaacaataatatctcatcaataaccttagagaatacacaatgagcatcctatgactttgtgcagtagtgtcctcccattgaggtaagtggtatcacaataagtcagtagaaacacttttaccagtgtccattataatacttcttctctcctggcttatctgctttaatgtagagtggttggtggtttgtactaggtggtgagagagagatggactgaacatccttaagcaaactaaatgtttctctcatgtaagcttttggatggcagtaatctacaccatactctctggaggttaccaaaaatggagcttatctgtgctgctatttaaatatgaaacatcgtgccctaatagagactggaaaaaatattagttgatattctctagggaaaattgagtttcttctgaagaacaggtgcatgaagaaaaggctgctgtactttgtcttggctcgtagacactactgaaacacttcctaggaaatgagttcaaatcacatctcaccgacaacatgaaaggatgatccagttcccaaatgctctactccataacttgaagccacagaaactttagcctagaaaaattttaatatacgtatgactggccattcatattggccataaaaatatctcacccaatcatagatatttatttggggagttatttctgaattctacttgctattatattcttcaggaaatgtagaccacagcaactgagttacaaggcttgcctcatggccttacttaaaagttgagggtacgtctacaataattaataagtataatacgttaattataggctttctttgtagcagtaattaattagtgccagttcagtcctatcttagataattaaatcataaaaccatatcttcaaggtttcagaaagctggtcttccaggtctcagtatcagtgggcatgcatctgaattctatgcagttactgtcagataacggggaggaaatttcaaagacaaagagacagactaattctctggggttttttcctctataaatttttaatgcatcattaaaagatcattgtttctgacttttgaaactgtggaagcatcagtaactttggttcttattatttacttcttttttaatctaaaataaggtgtgaagttgtgcttgagagaaatgatcctttcaacaagagatcctattgtagtagtttctattgtagtagtttctgtgaaagttttatcttagtttttaatgaagctgaaataagtctgtattgtcacctccctttgcgtcagaatttgtataactttgttggtctgcctttctctctgatgtgtacaacatacaacatacatatatctttaaatctcacaagtattctgctttaggaaataacttctaatagagtataccagaaggtaagcgtatatctttttatatattttatgaggaaaaggcacaagccatatttgcacttactctatcattgctaaaggaataaatcaggtggttcaaggaagaataatttaagaaaaacaacattttgatgtattacttggcagttaatttttaactggtcattaaaacctgactgaagatttctccttagaagcttggtattatcaaatatattactagttgaagacttagcttcttcatatttcaagttagttacactagttttcctctttcaggaaattttcatttatcttcagttgctgctggaataaatagagtgttttttgtaattttgtcttcaaacattcaccccaaaaatgtcttgctttggaatttctattttaatttttacttgttttaaattttaattcttttaggttgtggcagcaattgaagccttctcttgtgttagctgagtaatcgtgaagattgaactaccttagagcaacacagtagaattcccaaaagcttagtactcgtatctgcaaagtgcacaagtctttaggcatctagcaaaacaatgcccaaattatcttggttctcctttactggtgtttttctggagagctcaacaatttcaccatgtttatatatgtatactctcactttcccaagttcctcgtgcctccataatagaggagatgctttcccaccaaaagacggtgaattgattcaccaagctgtttgtaaggaatcatgatgtatcatggcacctaaaatgagaggaagggtttacctgttaaaagtcactgctgccgggtgcggtggctcatgccagtaatcccagctctttgggaggcagaggcaggcggatcacctgaggtcaggagtttgagaccagcctggccaacatggcgaaaccccgtctctactaaaaatacaaaaaattagctgggcttggtggcgggtgcctgtaatcccagctactcgggaggctgaggcaggagaatagcttgaactcaggagatagaggttgcggtgcgccaagattgtgccaccactctccagcctgggcaacggagtgagactccgtctcaaaaaaaaaaaaaaaaggtcactgctttgtctttcactttttttcgcttcagctagactcctagataaatgtttctgcaagtgaagtttattatccatacaaatcttaattgtatgcaacgaatgcaaaatgcctaagcccagacttacctgatcagaagctctgtgggtagggtccagaaatttgccttcttacaggaatctaggggaatgttagggatgatatagttggaaaataattgtgccaaattttagcgtttcttatattttaatgtgcatatgaatcaactattagtaggtctgggatgggtcctgaaattctacatttctaacaagcctatataacactgatgctctccatagctcacttggagtatcagtgtgctaaagtttttcagctggctgccccataggtaaggcttagacaaactatagtgttgctggtttcaggaagcaacagagttgctctgtcacaagtctcaggtccttctcacatttcaaaatcagtgtaatggagtttccaagacaaagtgccttgatgccctattgcctattattttggagaaagaagtatttcatgcctgttgagcttttgcagcctaaaagtggagtactgatcaagtagaagagacacagtcaagttgacaaattgtcttaaaatacaacatatcgcaagaaagagaaatgaatgaaatggtcttggccactgcactaccgccattgtgcaggagtggtaggtcaacttttaggactttaggtcatgagcagtctatacaagcctgggtctcagttttatactcacatcacaccattaacatatctgaaaacagtggtgcctattatctggctatttctgagttttccactggccagtgttcctgggaccattattagattaaggtcgaaggaccctagaacacttacactcttacctgtgacctgcggaatttcttctctttaaggagaggcagagagattgaggaaatatttggggtggggctagagcaaagttgagtattcttgtaggttgtggttaggaagtctgcagagaggaggacgttgaagatttagcaggaagctggcacagctaatacaacagttctggaggatgtgattaggaaattagttaaaggggtgatggtagtagcaggcttttcctgttggaggagggatagagataaagatgggtacagaaataagtgagtttggtggacggtaatgtatgttccttttaaagctgtatgagtttagagaaggaaatgattattgctaagaaaattaaccaggagatatttccaggaggaagtggaattgagtcaacggcactaaatgtggtagaatggtattataagataaaaatgatttgattttagcaacctgttaactaacaagaggactctgctacaggaggtgagaggattaaagcaaatttcactgggctgagaaatgaatggaaagagaaacggacattttgaacctatgcttttcttttttaaaaaattggcagtgactaatgaaatctgaatttcttaacttggctttcaaagccttgcaaagttttgttccattacatctatctaaccttactttccaaataatttataggttagctttattctcaattaagactgatttccttactgccttggaaaacatcagctccatctttacatatgtcaatattcatgctattactaccagtttttgttgcagggactttgctgttttttttttttttcttttttttccattttttcccctactgctttacaaatggataggaaagaagaatgtgtggatcttgagtgatccttgccttgagtggaagttgagagtgggaattagagagaatccctggttggggcagagggaggcctaacattcaaccaaggatttccatagaatgaaacatttgttttgagacagaaacatgttttaataacatattctcagtgtttgcttacaaaggggtttctctgtcaaactcttccattcactgaaagaaaacagcttatgatgtatcttaaagaaagtatgcttacatttgccttttatttctggatttctctacttgtcctcatagggcccatgttctagtaacatattctcaatgtctgtttacaaaagtttttctctgtcaagctctttcattcactgaaagaaaacagcttatgatgaatgtttaagaaagcatgctgatatttgccttttttaaaatacagatttagggggtacaagtgcagttttgttacatggatatattgtgtagtggtgaagtccagaataagccatttcttacaagactgccaacaagctgcatcagacacttaaaaagtctataagtaccatctaccaagacctagtgtcagtctggatatcaaacttacgcacagatacctgcaattccagcaattgggccaccttgtggctcccacctttagatcaaaatgtgttcctgctgctctgacttctctaaggcatccagttatgcaaaaggtgactgcactattcattagaattcataattctgatactcactaactgacttgagaggtagtaggtggatccatgggacaaggtagtcattttcttcactaaaaatctttgattactgatctttagtatatcttggttcttcatgactgagcaataaatttctttttttaatttaacttttattttaagttcagaggtacatgtgcaggtttgttatataggtaaacttgcgtgaagggggtttgtggtacagattattttgtcacccaggtatttaacctaatgcttattaattatttttcctgattctctccctcctcccaacctctaccctctgataggccccagtgtgtgttgttcccatctttgtgtccatgtgtctgaatcatttagctcccacttgtaagtgagaacatgcagtattcgattttgtttgctaaggataatgtcctctagctccatccatgatcctgcaaaggacatgatcttgttcttttttaagcaacaaattttcttattattctttacccatagaagagcattgttacataggaaccctaagatctcctatttggttagttataagatttttgaaatacttttgtccttcttttgctttcagctgacacaaaaagccctaatatgcattttctagactgagactcttgaatacatcagatattacagggcattgcaggaagataggataaaatagttggttaacatttcactaacatttataaacatatattcatatatataaataatgcctttgaatgaaaagacaaccaataggacacaaaaaatgtagtgagacaaatgtagagaataaatacattttaagattattttgtcgtttagcagcctctcattgttagaaagaaaagcaagaggagactggtgagttctcaggttccaaagatacagcatagagcacaacaacaattcagccttttgtctctctcgagtcatgtgaatttgaagaagtttttttttttaacgtatggtaacttctctaagctgggtttccctacccgtgaaataacaagatagaactgaagtagatgaatatgaactttcagaattttaggtgtaaatataggcatagctcaagaagaataaaagcctgtaacatgatgggaaaaaatgacacttcaggtgggagaaaaggaaaatgtgcagtagtgtggagtggcatgcattgtcatagggtggcaagagaacgggcacggcaactcaggggaaggagtgggaataaatcagtgaatttgcatagcaagggctaggctgagaattcccaagagtggttagtttaaaaagatagacccaactttttcacctactaatggagctaaactacttttgctgcttccatttaaacatttgatatattggccagaagtgggcagcaagagtcctgcatatgctaatcttaaataatctgtctctaatttactgaaaagtttattaagtttatggtaaaaagagaaccgaactgaatgagaggatattttaagtttacagtaaaaagagaactgatccgagtgagagactttcttgcttatttactgtgtaaatatctcgaatgctaattgtagaataaactgggcagaaatgacatcttttcaatcttgagtcttcccatccaagaatgcgggatgtctctctattatgtaggtcttcttttatgttcttcactaaaatgttatcattttcccccatgaaacattctacatggtatgttatggttatttctgatcatataaatgtatgctgattgtgaatggcatatttaaaaccacatttctcctttgttactgctcttcctttaggtttttattgtttatgttgtatttagccaccttgctcttcactcttgtagtagttggacttgtttgtctttcaattcttttttattttcttaagaatcatattctctataagatgtaatttaatgtttacttttctaatacttatatatcttctttatttttcttatctaatttaatagtttgtcctccaataaaacactgaatagcagtgaaaagcattgacaattgtttattccgagctgattatgacatgagcctttatggaagcccatccctttctttccatttgtctcttttccctttcttccctttgtgctcttccacccatgagtacatgagagcttttactaaatgaggattgatttgcttcttctgaaagtaatcacatttttcttaggaacttcctggtaatgttccatgtttttcttcccccccacaaaactgacattttctactggcttgctattatttgcatcaccaaaactgtgcctaatgcagtaatgcaccatgacatacagaaggctagaaatgtgtcggcccctccagaaaatgaacccacattatagtcgtgtagcaattttggtagtcactaccagcttctactcctttgaaatgtcaatttatctaaaattaatagctcctctccaccctatttttttttaatttgtgaagtctaaaaaaaaatagattatgaaacatcttagaattatgcataaagtgaaaataaatcacatctcagtgagaatagggagtattttcctctgataaaaggagcctggcctaaatgcagatggtagagatggttgctgtgtttgcttaggggacttatgtgcttgtttccaggtattggctgttctggggagttgaggttcttggaagagtaacatgttcatgtgttagagtaaatcctcattaaggagaatgcttctgcacctcagaaaagcaatctttgtgacaagctgtctttctttttttaatggttgcctcacatgggtggcactgaaaagattacaacgtgttcctcatcgcatacacattttacagctaaaccactattatctgatattcttatagttaatgattttgccatttttttggctagtgtttgtacttaaatggccttatagaatctttcttaaattcactctacctaattatttagcaatcaaaagagagccgaataaaacagctcccaaccctgcactaatcacctcttaagtattggttctatctatacacatcatcttagtttacatttattcaatcctttttttctttcagtgttatctctttctctataaactgaccggatattaattgtgactttgagtcatcgctttgattgctctgggatttggagtaaacctcagaagctaactgcatttggaacttttttgtagactggctttcttaataacctccaataacatctttagtctgctaaccaggataaatatcaacgaaaataaaccacagaacctacattcttgtgaagccgataaaaaaaaaatacagcagtaaacatgactggcaacttttgttgaacagaatatggaacagttgcattcatttcccctccaaacttctcactggtagaaaataaaggttcagaagtttataggagataacatgttgctcaaaagatattaatagcctttttagcaaattaaatacctctagatatagtgttaaaagaagtttggcagttgagataggtgtccaaattatgatacttagaaaaagagtaataatagattcaaatcttattatgattctagaaactttagctggttaactaaacattgagtctgaatcatttatttccctcacataaaattttccattttatttattttatttattttttttttttttgagacgaagtcttgctcttgtcacccaggctagagtacaatggcacgatctagattaactgcaacctctgcctcccgagttcaagcgattctcctgcctcagcctcccaagtagctgcgattgtaggcacctgccaccaggcccagctaatttttgtatttttagtatagatgaggtttcaccatgttggccaggctggtctcgaactcctgacctcaggcgatctgcctgcctcagcctcccaaagtgttgggattacaggtgtgagccaccacgcctggcagaaatttaccattttatttgtataagataaaattctaaatagcaaaggtcttcgaaagtccttggaaaataacacataagtaccgggtgttggctactcattatttattaattgctcattcatctctgccctgacttacagggctcagcactggatgttggttctcctagctcaatactcagaggtacttccatatttgctttgcttccttgccaccctgaggctgggtactccaaggagcactgtacctgtcagtctgtaaaagtgagtgaacttgaagctttgacccactggcaagtatgctatttctggttattcatgtgcttttgtttttccacaggaaataaatgataaccatttatttgtatgataatccacataatttcacactttccttgataaggttatgtgaggaggctaagtgatgtgcattcatgatttagtattgaaatcccatgatttaataaacacggagatttagaaattatgagataacatgacatttctagacagttttgcaaagaagttttacagtttctcttttatatttaaggtgactacacttgtcaacacaagcaacaaaggcccatctggtaaaaagaaagggaggtcaaagaaagcccatgtactagctgcctctgtagagcaagccactcagaatttcctggaaaagggtgaacagatcgctaaggagagtcaagatctcaaagaagagttggtggctgctgtagaggatgtgcgcaaacaaggtaggcagaatgatattattgttcaaggcggatctatactgatgtgcaaacaatggctttttctttagaatcaatggatatttactcaaagaagaagtcttacgtttttttcctttctatctacacttgtcatttttaatgtttgctggatgtggtacatagagatattttcattgttgcagtatggtacagctacaaacactccatgtctgctgttacgtcaaatcttcaagatgtttcttcttggtcaatgtaaacagactttgtgtcaaactcaggctttagggagaatgggatgggaagacctaacgtttatagagtcaatgtaaaatcaggtttctatggatgaagggggagaagaatgtaaagtattataagagaattattcttatttttctgcaagtctcaaattcatgttttcagttcatagatttcctcacaaatgtagcaagctagccactcattaataaatcagctacctctctagctagctagctataatactgttgatttagcattttaaaattttgatctgtataaaatatacaacataaagttctaactacggccgggtgcggtggctcacacctgtattcctagcactttgagaggccaaggcgggtggattgcctgagctcaggagttcaagaccagcctgggcaacacggtgaaaccctgtctctactaaaatacaaaaaattagccgggcatggcagcgtgcgcctgtagtcccagccactcagggggctgagacaggagaattgctagaacccgggaggcggaggttgcagtgagccaagatcgcgccgctgcactccagcctgggtgacagagtgagactccatctcttaaaaaaaaaaaataaaataaaaagaaaaaagtcttaactacttgtaagtgtacagttcaatactgttaacgatattcatatcgttgagcaagcaatctccataactgtttcatcttgcaaactgaaactctatacccattaaactatttcccatatcctcctccctgaagcctctggcaatcaccattctactttctttttctatgaatttgactgctctaaatacctcatataagtggaatcatacatattagtctttttttgactggcttatttcacttagcataatgtcttcaaggttcatacatgttgtggcatgtttcagaattccatcgtatgtatataccacattttgtttatacattcatccattcacggatgtttgggttgcttccactttttggctcctgggaataatgctgctatgaacatagaggtaaagatatctctttaatgccctgctttcagttcttttggatatagactcagaggtggtattactggatcatatgataattatatttttaatttttcagagcctgcatgctgttttccatagtggctgcaccatttccatagtagtgcactcctactaatggtgcacagcggttccagtttctccaaatcctcaccaacacttgttttattttgtgaattgtatcatcataattgttgtgaggtgatatctcattgtagatttgatttatattttcctaatgattacttatgtcgaagaactttttatatgcttcctaggcatttgactatttttttcggagaaatatttccagtcttttgcccatttctgaatcaagttgtttggttttgttgctgttgttaagttataggagttctttatatagtctggatattagcatcttatcagacagtgattggcaaatattttctcccattctgtaggttgccttttcactctattgtgacctttgacacagagaatttttaaattttggtgtagtcctatgcagcattgtagttgaaagttctaaggaccatgaaatcagaacagacacctactcccaagcttggtctctctcctgcattttctgccttgaagaatgcaatgcatgtctattgagttgcacgttgcataaatcttagtgccattcttgttacttccctttccttccaaatatagtctattgtaaagtttcctagatcttacctcctatatatctgtttaatggaccacttcctgtcttagttatttaaaagcactatgttttcatgccccagggcctttatatatgctgcctctttcacacatttctacacttcccagctcaaggaataccttctcagggaaactttatctgaaactcctgtcatactttttaatgggttctttccttgttacttttcacaggataattaagtatttgtgaggtgactgtctttcatgccatactataaattaataaaggcagagaccagaccatgtctcttttgctaatcattgattttcaatgcttagtactcattaaatatttgttgaattattgaattaagaggtgaatgaatggtctcttccaattcttcttgcaaacctaccactgtatcaattcacagctggatatttagtacctggaaacaccaaccctccttccacactaacaaatactgttccccttctgccctgttcttcctcatcctctccttcctcctaaaaattaatttcatctctattatactaacttaaattattactttaatttgcaacgttaaatgtgccacattttatctattgtgaagagtatatttgtgtatgtgttttggcagtgccaaatctaagttttcaggtgcattcgaaaactgatattccttctgaattgcagatggacgcttgtttgttttcatgcatctatagcctggatagttgttttatttttttcttttgttgtgggttttttaggttgactgccatataataaactgtatgcacttaaaatttacaatatgataaattttgacaaatgtatacatccatgaaaccatctttgcactgaagatagcaaaggtattcatagtagagagtggtttgattggccccgggcctccttttaaaacatttgtcttctatgataataaatttttccctttagtttctccaaaacctcttaagaattcttttgtcattacaagttagttttcacacattctgtagaaactaacgttttcattttcttgaagcttacatgaaattgtgttctcgtggatataatacaataaacaacacagttcttggccagactatcctaggagtattggagtaacaaatttctacagatgctaatttaacacagctaacaatggttgaacttctaggggatatttcaagttttctttttatattatcgatttcttcttacaaaacaattctatatcagaaatgttgtctacgtgtaacctgtataaaactcaaatgccacgtgctccttctcttgaacagtgtcaaattcaaagaagcattactatagtatgcaaaataacccaaaaaatgggtaaaagcatttaaaatttgctttgttatttttcattctgcaatcttttccatacactgcacatgcctctcaggtgtgagtggtgcacctcctcactgacagcaaggtcctcagtctcttgtttgaatttgatgcccagaagctcttatctccattctttccattctctagcacagctcgtcattatgtaatccccttagcttatctggctttagctgattttcctgtttgcccattacccaaattttatttaccaatgagagcctgcattgattttcagagagagaggtagagagaaaagagcttgtggggaaggaatatggaatggggcaagatatttagttaatggaaactttaaaacacagtatctttccttctatcatagaaatctgttttccaatatgcaagatgatattcagaaattatggacacactgacatttagaaaacaataacctcttttaaactacctccagcatccatacatgacttatttattaaatgatatgttgtgggaatgaaatctgttagttttactattgcattgtttttgtttttattaaaaagtattgtcactttttgttttcagcataagtaaatgccagttttcatattgtacatgtccattttcagatttttaatatagaactgttttgtttttcttttgaagtttcacaacattcattataattaccccatctgtcaagattatagaattatctatttaactatgttattgtatttcatatggctaaacagtgttatttgaatttctttatcattaaatatatatatatatatcttttaaacctggctgcatgccagatctctaaaagttttcagtatgagtggtgactatatttttactctagaatattccagtagaagatttccctatatctgtaaaaaaatactggagtaggtgttgtgctgaacccctatggactctgatggggatgacgccaggatcacggggccaaagaagagacccagagccagcaaatgagacatggagttttactggggggcttacctacgggggagaagtctagtggcagcaggctggcagaagaaccataaccatttgtgaaaggcatgcagttcatatagtactttcacgtatcaccatttacctaacaactttcacctggcaaccttcattcaacccaaaacggtgcctccatcccctctacaccccatgttccatgggctgggctgggggctcagatgttactcatagacaaggaatgaatctctaggtgggccactcccagattccctagctcagcagacacattcagatgcatctgccgtatggggtcattctcggagtatgcgtaagtttttgctctcaggtgtgtttatatacagtaggcttatgatagcatttatatttaaaagaagtaacaaaaataaattgcctaaaagagatattgtattcaaaacttagaactctgatgttttagactttgggaaagataggatatctagtttggtgtgtgtgtttctcccttcctatctgttcacttatgactaaagtcatgtgatatatgcatattatcttcctaatgtaagtttaaaccgtatcagaataggaacaatgagatttatgtatttctttcttctcctgaggcactcggcatggtcctctaagcacatggtaggtgatattcaggaaggagtcttgtgaaatcaggaaagcattggcagtttggctaagatatccaacttctaatctaacttttacaaataactagctgaaaagctaagtcacttaaccacttttagcttcagtttctccattttacaaatacaattattgtgtctacctaaatgaattgttttactaaatgaagtcacaggggattaaaaaaacgctaaatgttctatagatgtcagagtagatttattaattataatttattaaatcaatgtgtactacctatagcaatgtgtactaccttttgattagtgagcaagtcccggcctttccaagcaggatgctagagagctgaatcagcatctaatagtcttcatgaagaagattgagtagctcggtatggcttacagttggtggtagttgcacgtggtgtccgcaaactatgagtggatagatgtgcagctggtgaaccattcacagaaaagcttcttgaaaacaaggaatgcaaaggagttattccaatcatttcttcatattgaagctctggaccaaggaaagcttaaatcggggaattccagaacgttttcagtgtttaccacgaagatttttctagactgaaaacttttttttgactatgcactaattgaggggttctcaaactttagtgaatactagaatcacctgggaagatcttgaaatctttatgtccaggcctcacccctcttcaattaaatcagaatctctgcagttggacccaggcttcaagatgtttatagctcctcaggtgatttcattttacagccaatttgagaagaagtggactaatccctttcttgcttatcagccctgcttagattacttatcaatccatggtagttatttagtgtttcacatttggcagctgataacaggcagtcattatacaaggtttatgagcttattgtttacttagaagtaggtaggtaagggccgggcgtggcgacttgcgcctataatcccagcactttgggaggccaaggcgggcagatcacgaggttaggagattaagaccatcctggctaacacagtgaaagagaagtctggtggcagcaggctgggcagaagaaccacaaccaggggttgtggcaggcacctgtagtcccagctacttggggaggctgaggcaggagaatcacttgaacccaggaggtggaggttgcagtgaaccaagatcttgccactgcactccagcctggatgacagagtgagactctgtctcaaaaaaaaaaaaagaggtagataagacttacctaggagaaacaacttgatattctatattaaaatattatggatagatatatcctatgctaaatgatgtgttacccagcctgacattctgcaggtacacaggaatatgtgttaagtatatactgggcagtcaaatgtatagggcagttaaatatttcaggagttgtggaaaaaaagatacatagctgaaattaacaagaaggaggtaatatttaatgtgatcattgattaaaaattttcgaagaccagtgggacaagaattgcaggtttaagattggtgggataagaatttcaggctgtatctaattttcaaaggcataaaaaagaatggcactaataattggaggttggataaagaagccctgatttgatgaaatgtttcatattcaggtacagttagaaatataagatggctgggcagggtggcacatgcctgtaatcccagcactttgggaggccgaggcaggcagatcatttgaggtctggagtttgagactagcctgaccaacatagtgaaaccccgtctctactaaaaattcaaaataattagcagggtgtggtggctcatgcctgtagctccagataggcgggaggctgaggcagtagaatcacttgaacctgggaggcggaggttgcagtgaggcaagattgtgccactgtactccagcctgggtgatggagagactccatctcaaaaaaaaaaaaaaaaaaaaaagaaagaaagaaggaaatatgataagatgatagaacagatccagatagggaaaagtatagacaacatgatgaaaggaagggagagagggaaggaggacagaagctatctacctggctggcttctactcacttaaatgatattttagaaagattaatatggcaacttcatgaaaacctgactaaattagagaaaaactggacccagacagattggttaggtgtgatcataatatcaagggaaatgaaacaaaatatagtactactttgagggtccaggattgaggaggtggtaatgggaacagaaagaagctaaaagttgcaggcattacaaaaaaagaataaaatctttttcaacttactgaaggggagataagagccaaaatttgttctacatttttggccctaggctaattaattgggaagtctttaggagtgacaggggcaggggagagtgtacgggtttgattttaaacatagatgaatggggaggaccacctggcagaaggacaatgccatggtgaaatagagaaatttggaagtacttgccaatagagagaggagaacagagggatgaaggtatagttttggaagaaagaacaaactagtattagaaaatgaagtagaactaaattagggaaagcaatcccctgaaaaatatccagcgaacaaagaatcctaaaatccaagggaataggatgtttcttaaaggagatagtgatcactctagactctagaatgttgttgtagtcatatcagagtgttcagagattgtggagaatgaataatgagaaaatgctttggatttagctagacaggtgtcattaattatattcaaaagtgcattttcaggaagccacaagggcaatagctaaatgaaaagaaagaatccatcctgaaggaacagaaaagatgttgaaataattgatgtaggtaggaatgctaactagactctcttttggttatcattgcaatacatattgaaggtatttctttttgcctctcatagtctggtactcaactaagggcccctttgttattattttgtgtatctctggagcctgacacaatgtctgcacatagtgagcacttcaggcatgcattagaagatcgtcacagaatggaaggagagaaatggagaggagcaatggggagacattaaaggcaagcacaaaattacaactgtttgcctgcttgcttattgtttccagcccaaaaaagaagtatcagggtatatatgaagagaaggagccataattataatacaaagaaagacagttcagggttgcatgaagtgatgcagagaggaaatttctttatctagaaagcaggtagggaggagagataatcccaaaaatgttttgtggaaaaagtaagagcaaaagcagattagatgaaatgatctcgattattttgaacaaagacagaggtgtttttaatggaccatggatagctgatacttgaccactattggagatgtttttctattttttgtctgttactgccatctgtgtggatctcccgtacatttttaagggatttaatttactgaatacagctgacgattactcctttcatggatgctgctgaaaaggccaatttttatgaggcataatttgcctaagaattttttatttaattcatttatatggtatgtaactgcatctgttaaaaatggggtgttcacatacggtagtcagtaatcttattcaatttgaaatagatttgaaagctgtgctttgaatgataggcatcctttctcaaattttctcaataggcaaatccatttaatggtgtaacacagcattggttgtatgccataggacttatagagaatccttaaaacacctcctctgtcaccccgttattatatctccacattctcttaagccatggagcagttgcttatgtttcctgccttcgttcgacaacagcattttcacattgcccactgtctgtctgagcaatgacaaatccaaacagctaagatatgaccatgccaccaaggtgtatttggccagcgtgtagatgagatgtacatggtcctaactcaaaactaaggggaatcttatggagcagagtgacaaggaggtgcagatgaaagaagaagcttcttcatgggaccatttcctaaatgaaagtgatggccaagccattcactgctcatgcagtattttctttgttatgacataacctcaaatgtgaagtgatatggtgatatcaacaagttccactattttcttttctttttctctctttttttttttttttttttgagatggagtcttgctctgtcacccaggttggagtgcagcggcgtcatcttggctcactgcaacctccacctcctgagttcaagctattctcctgcctcagcctcccaagtagctgggattacaggagtgtgctaccatgcctggctaatttttgtatttctagtagagacagggtttcaccatgttggccaagctggtctcgaactcctgatcttgtgatctgcccacctaggcctcccaaagagctgtgattacaggcctcagccactgtgcctggcctcactatttcatttttattcaatcgacatttattaagtaaatgatgaccaatgggctaagacagagagcaagactgagaaaacatgacagagcatgacagaaagttctccttcacatatctgagaggtcataagcccttgcctcctaatgacctggtgcctccctgcttctcaccctctttggtggtgaggtgttagtggaatgagaggacccaacagaaacttcagttgatgccagctgtgtgaactcctaggctgagagctggtcagagactacttccctgaccaggaagctccctctgtcacacagctctgtccctcctccttcatttgccctataaatacataaagcagcacagtgtggggatggtgggcatgttcttctcgctcctgcagcactttccgcaggggtcagcctctctaaaaacaagagttgcgggaggtgggcaggattctgttactcctctgtgtgtccttttctcaagtatccctggctttatgcctctactccttataccctgaatacttgagtctcctaggatattgggcttcctttctgtgctgtgcgctgactcttcactgctgcctgactgcctctgtatggatggtaccttagttaccatgttctagtatgggttcttgctggtcttagggtaagatttcactcctgtatggggagcggaggggatgtttccactgaaggaggatacctttggggaaagaagagtattctaggacagaaaatggggatacaagaggcaaatcctaggtaagagaagggaagataactcatgtatcttccctctacggatctcacttcattgagcctggactctgctgagtgtagatccattactttttaaaatgatactattcacagccgggtacagtggctcatacctgtaatcccagtgctttgggatgctaaggtgggaggattgcttgaggttagtagttcaaaccagcctgggcaagatagcaagacccccatctctacaaaaaataaaataaaataatgagctgggcatggtggtgcacacctgtggtctcagctactctagagactgaggcaggaggatagcttgagcctaggagtttgaggctacattgagctatgatagagccactgcatttcagcctaagtgacaaagcaagagcaaatgatacagtttgagtaatgtaataaagtgcatgtgtgctagatccagcaagggcagaccttgaagttggaatggaggatgtcgttcttgagtctatgagtgcagctgagctagagatctgatggtgctccactatggccatacactgccactcactgtccttccagtggcttctcctccccttccttatagaaacttcattttacaagtgtttctcagagtgaagttcacagaccatctggttcagaattccctgcgtgggtatgggaggagtccatgaaaattcatcttgataagtctagccataactccagattcagtatgtctggggtgaccctgtaaattttattactagatagcaccccaagtaaatcttatgcttctaaagtttgagaatcactaatagcctaagtttaatacatcgttatcaacatcattttaattagttaggtctctttgccatggaaaagtatgctatctaggaatgaaatcaattctcagaaggtttaacatcagaagtttaaaaaataccaaaaaacctagagatgcatacaatgacaaaaagacaaaaagaagttccatgtgaaaatatgatgaaaaatgcatacacgtgaaaatgtcatatacccttaggattcatcttaatgcaaattttaacatttgcaataggttcatctgttgcatattttgttaaataaaatatatttgtatgccaaagtttgcattagctgagggcccaggagtacttcaggtcagcacagagccctttgtgtggcttttattgcaagacattggaagataatggcatattattctttcacctgacctctctttctggaacccttggcttttgaaaatgctatattctttcagcaaaaataacagcaacaatagcaatggtttattgtttgccactccatttgtaagaaactttgtatatagtctctcaaagtcatcctgtttgtcatttgaagtattatccatacttgtataatatgacactgatactgatatccatgtgcattgattacttctacaaatattttttgagttctatgcacaggcactattttgggtgctgagaatatgaaataaagaaaacatacattatctgctaataagaatattacattttgagatgagacaaataagtaaaatattaaacagggtgatgattataggctatggaagtgcaatttaaaaatgaaacaaccaaaagcatgattcatgaaaaaaattgataatttgaatttcatattaaaactagaaactttggcactgagaaacataatactaagagaatataaacaagccataaactgcaagaaaaaactggtaaattacatatttgatgaaagacttatatccataatatacaaagaactcttaaaattgcacaagataaccagtaactcaacataaaaatgggtgaaagccctgaacagatacctcaccaaggaagacatgcagatggcaaataagcataagaagcaatgttcaccatcatttgtgattggggaaatgcaaattaaacaacaatgagattttaatatccttactagaatcactaaaatctccaaaactgacaatacaaactgttggtgatatgtggagcaacaggagatctcattcattcagatgcaatatgatatagccactttgaaggacagtttggcagtttctaaaataaaactaaacagatttaattgccttataactcagtaatcacaaccctacatatttactctgctgatttgaaaacatctatttatatggcatcacctaatcttgttccattttctaaaataaacttagaataattttagacttatggaaaattcgcaaagatagtacagaaaattacatatactctacacttatttgtcacaattaataaaccaatatttatagattattaactgagcagagcataataataaaaaaaccataatcacaaacctttctgttgatatgcttagcaaaaatggcaagaacaaacacagtgtgagtgccgaactattcttatttttaagctgacttgcaaagaatggtaaattatacatctgtatgaataagaatcagaaatctagtttagaagattgccaattcaggactgtttcttttaatacccttttttgaagtctaaacttaccagtctaagtaaaaccattcttgtgtttcacagaaaacatttaaagaggcatgcaaggatatacaaaatacagaaagagaataagaaatccatggaaaagagaaaagacaaatatggtcgaagactcaagaagagtcagggaagtgactaatgcacatatacattagggcctatgcatcctgtgcaaacctgtccacccgagaacacagccacaggtggctcaatgggtggggcttgctttgcagtagagtccaggttcaaattccaactgtagtttttatggtgcctgcgctgtgcgacctgggaaaattatttactcactctgtgccagtgtgttcatgagttcattggggctcatcttacattcattccagcattgctatgcagagcagatgataggatgcatgtaaagtacttagcaacagacctagcacacctcagacttgaaaaacctggtggacgttgtctttattgctaacgtcattgttattcttgctacaactggacaacagattgggctcttaagctttctgacacatcagttgtaaagttaatgacaaaattgtatttttaatcataaaatgatctttccgatagatcatgaaactatctccatttcatgtaattcactttgttttaaggaaaattccttaaacaaaatgtttgatttgtgcataaaatactctacgttaacacataaagataaagaaacctggttatcaagcattttctctctaaaagctaggtctgtaattcaatcaaaaatgcattcgatataaacatcttgaataaaaaccagataagattgttgaagacgaagctgattcactgatgtgttctaattctgatgtcagtgacttgatgcaaaccaggcagtcttcattaactctggacctctcagaaaccaaggctgggcaagcgtgcttctagatgtgactcttctttttttaaaacaaaaataataataatttcaagatttatttcagatttggggagtgccttcacaggtttgttacctggttatattgtgtggtgctgagatttgggatacaattaaccccgtcacccaggtaactgagcctagtacccaagttagtttttcagctcttgccccctccttcctttcctcttctagtaatctccagtgtctattgtcaccatctttatgtccatcagtatgcaatgtttagctcccacttacaagtgagaacatgtgaaatttggtttcctgttcctgcattaattcacttaggataatggtctccagctgcattcatgttgctgcaaaggacataatttcattcttttttatggctttgtagtatttgctattgtttaggtaccacattttctatatccaatccactgttgatcagtacccaggttgattccatgagtctgcttttgaaaagaaaacaaacaggtcaaggttaaaccatgctgaatcttgttaggtgcatgttaataaaaggtctcagatgaccagctctttgaagtgatatataggcaatctggaaaaatcagatcttacaataaattatggagatgtcaacccagcattgtggagctaagcagacacattaatcattagaaagtggtaaacagaaagaaatgcagaggctgaattacctcatcttaaactaaaaatcataatgcttgacactgtatgcctactcttttgttgccacagttaaaaatgaatgaaaagccacgagaccagcctggccaacgtggagaaaccccgtttctactaaaaatacaaaaaattagccaggcacgatgatgcgcgtctgtaatcccagctactagagaggctggggcaggaggattgcttgaacctgggaggcggaggttgcagtgaaccaagatcgtgccactgcactccagcctgggtgacaagagtgactccatctcaaagataataataataataaataaaataaaattgatgcttatgaatggtcactttttctcccatactttttctctggttctcaggctcaccaagcttgctctgctttgagtcattgggttcaactcttcgttaaacctggatgtttctttccctaaatctttacttaacctctcagttgcatcacataaagttgagctcccgccctgcatccctggttcatcccctttcttgtttctcttggcttctacaatacctcctttccctcccacttttttctggttccatatcttcttggaattctatttattagaatgtcccagggctctgaactgagctttgttttcttctttgtcaatcattttactgtatataccaaccattccataatttctacttctgggcccaagccatagatattgctatttaatatagcccaaatacagcctctctcatttttttttccaattcagaaatgggactaaaaatccagttgcttaaatcaatagtgctagagttaaactttattcttttttgccccctcattcctcacatccaaagccctcagccatgctccaaagcaggtcttaaagctattcattttaaggcggtatagcatattcgttaagagtacagtttacggaactagacagcctacatttgaaacctgactcaataatttattaactgtgtggtgttggacaagtatttaatgtctcataggcctcagttccatcacctgtaaaatgggaataataatgattgtcatataggcaaggcatgtaaatcagtgactgatagatagaaagcattatgtaaatgctaattaagacatttgctcagaaaggccttttctaaccccttgataaataattatatatgtatattacatataaaatgtgtgtgtgtgtgtgtgtgtgtgtatataatctttagttattttagtctgagttttccagagaaagagaaccaataggttatatatgtgtgtattttaaggaattggttcatgcagttgtgggactagcaagtccaccatctataggacagtctgacaggctggaaactcaagtaggagttatgctgaagtcttgaatttcttcttttccagcagacctcggtttttgcttgtaaggccttctacctggttcaatgaggcccactcacattatcaaggcaaatcttctttacttaaatgttaactatatctacaaaatgtctagaaagcaacaacttagcttagtgtttgattatattactggttactaatgcctgaccaacttcacagaataaactaaccatcacaataggtaataattgataagtaatgctatgccaatttgaaataattgtacttatgtaaaagtgcatttattgtttctaaatttctatgacacaatgcagtgttcatgacccttcttttagaaatagttgcctcttggtgccagatttctcctggaaaacccttgtcctaccaaatggaggctgtggggtgtagataccaagcagggtgttacgtgtgccctcttgggtacaatggagactcaggtttgccaaaagccaaatatatggcatggcgcaagtcagcctttatgtgccacaatttgtatttgccaaatattaatgccagtctcatctaatctataaaattctaagaattagataaatgccagaatgaatttgggaaaacaagaaacattttttaaattgaatatgtgaaaattaaattgcttttaaagacatgatttttcctttatgaaatgacgataagctgaaatgctgtatattttaggtaaatagataatttttccattttcggccacgtctatgttttaggttcacattttttgccatttcagtgcgtgtgaccataaggatttaatgagctgttggcatgatttatttgaagttttactttaaaaaaacagttttaacaacccaagggtagtttaagttttgtggtgctattaagccaatctggccttctattttgaatttctataaataactaatgctatgtaagtcaatgcatattattgaaatatttttagtgtttctgccatttctctttgtacttgtgctctcgtgaatggagtgaaatttgagctcaagaacgtttgtctttttaaagcataaaagtatttaataacattggcttttgaaaagcccttaaaatgtgcacgtatttgtatgggctgcataaaggaagaagcagtttgttgcttcttataataattatattatagttccccgatgcagattcatgtgggagtatttaagggatgaaaggtcaaaaggattaaatatttacattcattagaatatgatcttttggtgtaggcagaaaggaaagagactaattggtttacttctaattgtgagccttatgaacttactgctttggtaataccttaaatgtcatgattaaaaatattgatctgtttctctatgggcttccactgaaatggtagcagtcatctgcaatattacctaatacatttaaaatatggtctttaactataagtgtgagtattataactaatacatctcttttttatgccaagagctctgaataacaagcacttgctcttcttggtatagtgatctgagagccccattgtattctgtttgttttccttaagaaaagcaaggcagaagggcttcgtcgttaattaggctgtgtttctctgagcaagcctatttaatctttggtcttaatttctcagctaggaaacaaaatcttcaaatttgatgttctctaatatttcttggaaccatatatttttgtcttgtattttaaaaagaagaggaagaatggagactgaatccactgcccaatgttggatttcgattagtcaacccaggcgtggtttgccccagaggagcttccagtctcaattgacagcaggccaagagtcgggaaagacacggaaaacaaggcaagatacgagcatttcaagagaaatccccctggaggagtgcttcaagaaaatcctcctggtttttgcaaaagaccctcctggttctttcatttcagccttgggaaacagatcatgacattgcgtaaaaggtgtaatcctagaacaacgagtagattttatgattttttattagtttgttttcaattctgggtcagaatccctttgcatagagtgtcctagagattaaagagcaaagataaaataagtaatagaaaaaaaattgaagataatttatctacttcttctggtattcaggcaagacctggtcaaaaatcagcatctttcaattcatgtttatatttcatttatgttctgtcttgaaaatgaatataatcaattaaaaaatcaagaatctttgtattctgctctttcatgttcatctttcaagaagaatatacattctaaaatgtgcaatagtatgagcttaatgataatgactttaaatttagttctgtaaagttctcatgaggtttagtttttcatatctcatgcatttacacaattttatggtggcgattttgatttcgaatgagtatctcctattctaggagtgtcagaagcttttagctgtactgtcgggctctgtaacaaactgtttttcagaattagctattagttaactagaactttaacccaagtgctcttatccccttaatttggggtcttattctggttttatatctttcagatacttagaaactattcttttatttgacagtttcgtgattgacaatgggagtaataatttggctctccccttttatctttccttgttaatgaagtctatatcgctaatatttttatcttttttaaatcttcaatttgcatttctatatggtaaaatgaagttataaactaaaccagttattccagatgcagaccaagatcaatgttactatgtatctccttgttttgttgaataattcagctttatattcatcttgcacagaccctgatatttttctttcatgcagcagcaattggtttgaatttattgcacactttgatccacagcttctttctgtgtagctttttctccattttcttctccatccagaaaataactgttttggtgtttatgatttgtatgtttttttcaccttgacaatcggtattgtctgtttatgtcctatttttctcttttatttcaaagggcattgcaaggtagaaggtagagtattattataagtactaaactacttattatttcttatagtttttcaacatctctgcaatagcagcatcatttttccatctctatggtagtcatcatcaaacaatatgatctggtaatatcatccatctgctttgtaataaagccacagtcacagagtcatataatttttgacctgaaaaggaacttgacggttgcattgtttgtggatattctaaagatgaggaatgtaactcctagaagtttccccttggattccacagctcattacaggaataagaggactaggacatagattttcaggtatgatagtctttcttctgtgctgtttaatacgaagttatcaaatggatataagttgtatttaaaagcttttgttggccatgtagtatttggactgcattaggcttagagttaaggcaacagcccactccatccactcccctccctgcatgaagaacgggaaaagcaaaattggtcaaggacaaagtccctccagacacacagctacacagttaagtgatgatcacagtgggtccacataggagggaaaacagaccctgtaacttgtatcaccagttcctactcctcagtggggaaagagacactcagtgttaaaaattggagcagaattaactgaacaacatacagtaaattttgctagcaatatttatgaatcaccttgtatttaataaggacattttcatattaaagaatgttctcttccaaatttaaagataactcaataatttgattttacttattttagctgtatatttcctgttatgccaattatacaaaactataggcaacctatcactaatgaactattattcaactaataaaaatatattttgtttttacattagcaataagtatgtggaaagaattacaacatgtgcatatacatggattgaagtctagtaatgttgaaaactataggccaaaaaatactgttgtaaatgtattttaacattacataaattaatgtttataacattacatccttaagaatcaaaaacaattcatctgtaagaaacaaagacaggatttgcattccttgataagtttgagggctcatcaggaaaagccttgttggttctccaaaagccacagaacagtctttgagataagagtggtccagtaaaaaggaaaaataagtgagtggcttagacacctgtttcctagactgaaaaataggatcttaaaattgcctttttttaaaagacttcattttgctttagatagactaaaactagaatgtgggcccagggagtaagggcatgagctgaccactctgtctgtcttaggtaaagagacaacagaagggtttacaaaggattcactaagtgaggaaaagatgtggaccaaaacttgagctgacaaccgggtaggattgcttggaattcagtatgcatatgtgttagaaatagtgagagtaattagaggttatggtagggttcagagggaaaaaatggaacttaaggatcagagcttcaacaagatatctaggcaatgggagaagggcatcatccttcaacaagaagatttaataagtttttggtttgttttcaaaacaatgtgcacaatgtttggtttggtttgtgcacaatgtggttaagacgaaatgaggtaatatatgtgaaagtattttttccagtgcttatctcagtaaacatttgttgaccgtggttgaaatgattttattttctttaaataatgacagaagaacaaaaaagagtatttcctctattgttacatttctagagacacaagtcactagtactttctttttttctaaagctatctaaattatctgcattccctgacttcacatattccttttacttacaaatattccaagtagtttcaaacgttcctttactgaagtggttttcaaacttctgtatgcattaaaatcgcctggggagcttgttaaagtataaattctatatgcacattgaataagatgcttgtgtttaatgggaggtgggcaggttaaagttgctactggactcctagactgcccttccagaaagatctatccccacatcccagcatgccgaagcacttcagaacacacacccatcttccctgcgttgaagtttggctttagctgagaatcacattttctcccccacaggaatatgccaaaattctacttaatcctcaaagataaagttaaaggctacctccagaaaggcttgtgaatttttaaaatgagatgtgatctttctctttttatgcagcctcaacactgtgactaatagtgtatattctgtcctgtttggtgttatgttacttgcgtactccctcacctttgcccttctcccattgcctagattataattactctgagtatgttcttatttgtgcacgttgtcaatgctcagtatacacattgcatttagtgggaacttattttttaaagcgaattcattcttgggaacaaatccagctttcttgttttgattggttcatggtttagtctttctacttaggataagagtagtttacacaccgcagtcagtgttataatattctgtgtttctttgtgtacttattgttaccagtaagttttgtaccttcaggtgattatttattgctcattaaggtccttttctttcttattgaagtgcttcctttaacatgtcttgtaggacaggtctggtgttaatgcggtccgtgagcttttgtctgtctggaaaattctttatttctcctttgtgcttgaaggatgttttcaccagatatactattctgaggtaaaagtttttttccttcagcactttaaacatgccatgccagtctctcctggcttgtaaggtttccactgaaaagtctgctgccagatgtattggagctccagtgcatgttatttgtttcttttatttttctgcttttagtatcctttctttatccttggtctttgacagatttgattgttaaatgcgttgaggtagttttctttgggttaaatctgcttggtattctgtaaccttcctgtacttgcatattatctttctctaggtttgagaagttctctgttattatccctttgaataaactttctacctctatccctttctctacctcctctttaaggccattaattcttagatttgcccttttgaggctattttctagatctataggtatgtttcattgattttcattcttttttcttttgtcttctctgactgtgtattttcttttttcttttttttttaacacagagtcttgctttgtcacccaggctggagtgcagcggcatgatctcggctcaccgcaacctccacctcctgggttcaagtgattctcctgcctcagcctcccaagtagctgggattatagacacgcgccaccatgcccagctattctttgtatttttagtagagatagggtttcaccatgttggccaggctgatcttgaactcctgacctcgtgatccgcctgcctcggcctcccaaagtgctgggattacaggcgtgagccactgcgcctggccctgactgtgtattttcaaatagcctgttttcgacctcactaattctttcttctgcttgatcaattatgcaattaaaagactctaatgcattcttcagtatgccaattgcattttttggctccctaattacttcttgattctttttaattatttcaatctccgttaaatgtatctgatagaattttgaatgtcttctctgtgttgtcttgaatttctttgcatttcctcaacacagctattttgaattatctgtctgaggggtcacatgtctctgtttctccaggattggtccctggtgccttatttagttcacttggtgaggtcatgtttttctggctggtattgatgctggtagatattcttaggtgtctagacattgaagagttagttatttattttaatgatcactgtctgggcttatttgtacccatccttcttgggaaggctttccagatatttgaaaaaacttcgttgtagtgatctaagctgtatctgctttagggggtaccccaagcccagtaatgctgtgattctcacagacatgtagaggtactgcctcgatgatctcagacaagattcagaagaattttctgtattattaggcagagactcttgttctcctcccttcaaggcagcaagtttccttatggcctagtgtgtgtctagaaacatctttggggacctagggcctggaacgggcacctcatgactctgattggtgccctatcctgctgtggctgagatggtatccaagatgcaaggcaaagtcttccccactctttcttctcctctcctcaagcagaaggaaggggtctctcttggagctgtgagctgtgcagcctggggttagaggaagggtgatgccagcactcccttagtcaccccagctagtatgtcagtatgtcacatgccccttcagtccactgtctgtgacccagttgagcactaggactcggtttatttagagacccagagcactttggcatttggtgatgaggtctgtgggaactcaagttcagacctctgagatctgtggttcaccctggctagggctggtctacatgctccctctgtgggtaggtatcagccgagtttggtctgattttcctttcttctctaacaggacagcactgagttcatttcctcaggattgctgagctgtccctttcccagtgccagaggtgctctttgcatggggtcagggaggggtggcttcagtgatccaggagttttctgtgcctgaagagaaaagtctcatagtacctggttttaacactgtatgattgaaggaggcactgtctttttagtgcctctttcagtgataccgtgttaaaaccaggtactatgaggtgtcaggtgatttttggttcctttgaagatgttttctctatatagatagttgttaaattggtatccgtggcaggggtgatcggtggagctttctattccaccatcttgctctgcctcctccccagctttcttgtcttgagacaagacacagtaaatatttaataactactttctgaatcaattagtccacaatagcatcacatgctcttgtcaattataaaaggaggtaaaattgtcaataataaaaggagggttttttcccttcattttggggattaatgtttaggagacaatattcattagtactgtttctaggggatttattaaatatgaagcttcatacacacaaaggcttcatctccctccctaacacacgccaactctctcataccgtgtagccagtaagagtccagctcaaccttttgtgaaaagcagtttgtgtgactgttttgttttgcttatgttttttgagactgagtctcactctgtcgcccaggctggagtgcagtggcgccatctcggctcactgcaagctccacctcccgggttcacgccattctcctgcctcagcctcctgagtagctgggactataggtgcccgccaccacgcctggctaatttttttgtatttttagtagagaagaggtttcatcatgttagccaggatggtctcgatctcctgacctcgtgatccgcccggctcggcctcccaaagtgctgggattacaggcatgagccactgtgctcggcctgtgtgactgttcttaaagtttctttcttagaattctttttttccccttaaaaaatgtccaaaaatgttgacttcggaatgccctcttgattggacattgtggtctcgtgttgctctgttagcaggttgagggcatatttgatcttgaaaaatggagggtcacttaatcaatgcattttccttgggccagctgactctgatgttcaaggagactgaagtgttaaagctggatgactctgcaggccacttctggttttgttgaagtgaaaccctccataaagtcagttgatattttcatcttgttttaacaacaggttcttcacgtagattacatctccagaaacttctggattatatatacctgttaaaaattcctttcataatccttcctaatttagcccttagtaaagattaatccctagctctgtcattgtgcctatccaataattacaactgggccttgttttgaagctgtccttaagcattagttacgttttgaactactggcctcatagcagaagtctcttaaattctttcttaaaggatgagttgaggaagcgtttacagaaagaattcaatttgaaatattcttctgattaggagttctccaatggaggaaatactggaatggaatcctgattattattacgtttgttattgtatttttgtcatagcctttaccctgaagtcatcatgtccaatagaactttctgcaataaaaatagtttatatctgtgctgtctagtggggtatccattcaccaaatgtggctactgagcacttaaaatgtgactagtgtgactgagcaactgagttttaaaattcatttaattttacttaattttaaattgttaccttactggcagcatgaatctagaacagtgaatggttttaccacttccctccaggggacatttgacaatgtatggaggcatttttggttgtcacaagttggggagtgcttctaccatctagggggtagaagtcagggatactgctaaacatcctgcaatgcacaggacagccatcacagcaaagaattatctagcctaaaaggtcaataatgctgaggttgagaaatgctggttttgagtctgagatttttgagacgaggattgcttccctgtctcagtgcctaacattgtgctatgtgtatattatttagttcatggtctctaaattgcagaaaattaactgaaacagagaccaattagtcaacaccaaaatcactggaagtgcatcattttttagacaaaaataaggcaatacaaaacttcggagacacatgcaatgaaagtaataatctttgtaagctcactaaagcagtaaactacaataagtaaagggtaacactaaagatgaacaggcataccacaaaaatactgtctgcacacagtaagctatgtttgatgtgcacaaaatagcttcatgttattaaggcaaatgtcagtatttaacatttgcaaaatatgggcaaactattttaaaatcaaaatagagtacaaagaaatgaaacattactcattcaatttctgattaccaagagagatatatatgttctttttaaactccattagttaaaagttaaataatatgtttctcattttattgttgagactggagcaccttggagaacttaagtaacaagttcaagttatgacagccagttattagcagcttttggtttcaaacttagttctatcttcaaagtaagtgaaatcaattcttaacttgtatagcatctagctttctatgttttagatgaagaaattattgcagaaagtttaaaagaattaccaggtaacacagttagtggcaaatcaggaattagaatgcagatcaagctggttggcctctaacctcgtgaaatttctaatcacagcctattttttgttgttgacagacaaggctgcttttgttttgctttgttttgattttccaaatcaaactacctattatgtggtgaatcacagtagagaaatttgtggtttgtacttattttaaaacttgatattttatgtaaacttaatccttgtagatggcatcaaaatgagaactagaatatacttaaaaatcagaattcattaagctgatagtcgaaccacagagcagaaaagtatcatgtcctctgaaagtcattgtcttttagctcagcggtcccaacctttctggcaccagggaccagttttgtggaagatagtttttcctcagacgaggggtaaggggatggttttagtatgattcaagcacattatatttgttgtgcaccttatttctattattattacattgtaatatacaatgaaataattatacaactcaccataatgtagaatcagtgggagccctgagcttgttttcctgcaactggatggccccatctgggggtgatgggagacagtgacagatcatcaattattaaattctcataaggatctggcaacctaaatcccttgcatgcacagttcacaagagggtccactctcctatgagaatcaaatgccaccactgatctgacaggaggcggagctcaggcggtaatgccagtgatgaggagtggctgtaaataaatacagatgaagcttggctcacttgcctgctgcttacctcctgctgtgaccagtaccagtccatggcctgggggttgggcacccttgttctagttgatacaaaattatcttccaaactgagaattctcattgcgactgttttgtacattttaaagctaatgctatataatagttttatggctatgatcacagccttataaaaatcccgtgttaaagatgtaacaatttcatatgttttgtgctaaaatgagcctttggataagttaaccccccctcctcccctcccctcctctcctcttctttttttttcttttcttttgatggtgccagagaggatagagaagacttgctatagaatggacttctgaaattcatttctctctattcctcttaccttttgtccatcctctctccttccctttcttcctttcactaatatttattaactgcctacaacatgacagatgctgaactaagactttgaggtttaaagaaaaaagatagggacattaatcagtttgatattaaaaaaattgtcttcaacacgtccatccacactccactccccatccctgaagactcaatctctcaagtgtctgtgttcccacagcttgttgtttgctcacataaaattagttaaggcatatggtaggtctctttaataaaaagatgcaaaaatacagtaccttagagaagatggcaagatagtggtttaattccatctcagataatagttcagaagtggatgcatggtctggtgagcagctctcccatcttcagcatgaggcttcagcataaggccagggtgttttgttgactctctgccttgcctttgagcatcatgagaacatggaatatttattttaagagacaggttctcttctgttgcccgggctggagtgtggtgacatgatcatacctcactgcagccatgaactactgagctcaagcggttctcctgcccagtcaccagagtagctaggaccacaggccaccttacctggctatttaaaaaaaatgtgtagagacagggtctcactatgttgtccaggctggtcttgaactcctggtctcaagtgattttcccaccttggcctcccaaagcatgtttgtccatttttacatacctaatgattagcaccatattagatcatcagtaatattaaaatgaattttgaaaaatgtttaaaaactttaatgtagcattttcagttgttctatcaaacataacattttattctaggaactttatctcactctgggattagataggtttagggcttgcttgcttaggattttctctcctataggccttccatgtccatttacttccagaattggaagaatattataaaaggcatctagtcatgtggaaacagccatgaagactagaaaggttggagtgaacagccataacccataaactggacataaactggaagtgtgagttaagatgacttttttaggtacaagtggcaggaacccaatctgaattaagcaagagaggatggtattgtcaatcaagaaaaatgacgaggtaagtctcaatgattttaggaagtttatttgccaaagttaaggatgcactcccatgacactgcctcaggaggtcctgatgacatgtgcccaaggtggttagggctcagcttagtttcagacattttagggagacctgagacatcaatcaatatatgtctcccgttcagaaatatggggacagctcgaagcagggagggggcttctaggtcacaggtaggtgacagaaaaatggttacattcttttgagtttctgataagcctttccaaaggtggcagtcagaatatgcatctatctcagtaagcagaggggatgactttgaatagaatgggaagcaggtttgccctgagcagtttccagcataaattttccttttagcttagtgattttgggggctcaagatgtttttctttcacagtatcttatggagaatgggggtcttaaggcacccactgagaggcctcatgcaaaggtggaaacaaacatagtgagtctttctgtctttcaactctgttcctttctgatatgtgccaaactgctttcatgctgaagattatcttttgtttttttctgtccactagatagatccaacacaatctgagttttaaccagagagagccagagttgattcactactttctttgggttagtgtaaaatcttggctgctgtattattatagagactcgagtccccttttggtagattgttttcagagatggctgctacaccttcccccatgatcttttgcaatgtggctttgtggcttctctcatcaagaaatcaaatattccctctctcagaatctgtgaacctgtcttaacatttgccttaactaacaaactggttgtggcagaagtgacactgaatgagttttgcacccgggcctcaagagactttttaatgtttgtttctgccctgttgtaatgctgacatgagagaagaaggcatgaagaccccagatgaaatactaaatagaaaaagaagtgtggctctcccagctgatcttaaccccctgctgacagcagtgctaattgctaaatgggaatgtggccatttgaaccttctagcctagctgaccctgtagttgaaagcctctgtattagaaagttcagagaatacccgccatgcctccagtcatgggaactaataaatggttattggtttaagacactcacttctggagtgtggttttgtttgtttgtttttattgttttaatgcagcaatatgtaactgttagactcttctagacactctgggccaggagtggagtcacacaggaaaatgagagctccctgggtaattgcatgtacatagtactgattaaaggcaccatagttaacagagctgtaggaaatggctctgagaagaaggcatggttataagcaaacagggcagtaatactgaactacaaactatgtatttcatttgtgaatatccacaaaacagggtggtaagattattttttgaaatgagcccccaaaagcaatattgaatttgcaccatctttctggcccaatattaggaaatttctatttcttattccctctttcactttcaccccacttaccaggaaaggaatagattcctaagccttagtggcatagagaaacctttcttctgaccttcagcatttgtaactttagaggatgaattgttcctatattgcagattgcgtcagtaacattaggggtcatttttatcaccaatgaatattttaaagccatccctttatgattggactatatggttaatactgctgagcttatctagttggaacattgcttgggaagggggcgatattcataagaaagactaaacaataacagcagctgctgataaatggacagtgttgggtttctctcatttggtatggttgacaaggcatgaatgacagttggaaaacagttctggaagaagcaacaaaagccctggatcttttaatattctattttaaaaattctgcagttttgtggcattttggttgtagaggatacagacagaaatggacagctgtatgtctacttcaatttttaattttctctctatttttaacttttccctttagcaatgctaccattatataatgatctatttagtacattttggcatcattgatattagcatttctcaagaggctacaactaagagtagaaaaatacaaaggatcaaagcatattggaacttaaataagttaaagcattttttaaaatgtattttaagttcaggggtacatgtgcaggaggtgcaggtttattacataggtaaacatgtgccgtggtggtttgctgcacctatcaaccaatcaccaaggtattaagcccagcatgcattaactattagttacagcattaaaaacaaaaacaaaactgaggcccagtgagattcaactctgtggtagagggcatgtggaatatgggaacattaggccatttttttatgttttcgaaacaaataaatgccattttctgtgttatctttattcttgagttttttggtaggtgttgcatagtagacagttgacattgccaccacctccaccaccagctaaatagcactcttcagtggtcatgagaactttatttcttgttgcatttctaaatttactattgaaatctcaaattcttcttccgactcttaatattaggaagtacttgaactcttaactcacagtattctccatagttggtaagggtatgagtgagagggaattcatctaacttcataccctgacagttacttatgaattatacataggcaagagtcatctgattatactcctcccttatgagctgcagacttggaaattagtgtccaaagcatttattcaaacagacagcaaagatattctggcacagtttaatgaagaccagtaaactttcatctgcctgaaattttaaaatgtggaatcctcaaataatgaaactttgaacacggcttttgtttatgttgtttgtatatgccttagattggtgtctaataaattccaaccagttaacttttggaatttttttttaaataaataatgaacaggatacataattagaaaggtactatgtgattcttcttggcatgatagtgtctgggtaccaccaaagcaatatccatggtaacagatacaaaatctcttcatgataactaagggctttctaagcttatattctttagaaagctacactgaaggtttaaggtaaatcaattgcatatgagtcgggaagaaaaaccactgtataaatcaaaagcaatcacttagacaattaggagatggcagagaccatgaactactcaactgggatagaattgccaaatatatccgcacattcaagcatttaaatccacttatcataaagtagttctaaacttcaaacttattgttcactggcttgttaatcatatttcaaaaacaatgaaacaatggcatcatatttttgtaatgatattatatattctttaattcaggacagatggctgttcttatattccacagaaaatacatttcctaattatggagcctaggagataaaagtattagcttaatctctaacccttttagttatttgagccaaacccacatggagtttgctaaagagctctgtcacattggtacaatttctatatgtttctttctgaggagctgagagcatcttctgtgagtaacctagagcatgtaagtacacataatgaaaatgctcccttggaattaactcacaacttgatttatgcaggttggccgactcgtgtatgtgagacctgcttgggctccagctgcggttaaacatgtctgtgggaccagtagcctgactttccaatcagagctttgttgctgtgactgctgctgtggagattcaagccacacacaaaccagctgaagagaaggaaatttatcttaagcttgagtagggttcatgggaatctaaaaataggaactgcttactatacagctggtcctcatggggcccctacctggaaaatttaagtgaaagcaatctgtcaacaactggatgatttctctactataagaacagccaatatttactgagctcttagcccataccaaacacttgttatgtgtgtgtgtgtgtgtgtgtgtgtgtgtgtgtgtgtgtgtgtgtgtgtctgtactgtgtatattcatttgcattccttaccacattatgactaaggtactctcatcttcctttatatatggatgagaaaactggttcttaagagtagccgagagacttaccaaggccacaggttgataattactagaacaggaattcagatgcaggtggagtgctcccaaggcccacttacttcaccactgcaatgttttgtgtccagcagagagcttgccccattctcttctctgtgcagagcacttgatgtttgagcataagatatgggattaaaacccatcttaccaaaacaaaaggatgggaatctgacctgattttattaaatcaattctaggatggcagaattatttctccatttagaggaaaaatatattatgtcccaatttctaacctatactatttctccaaatgagctagtggcaagataaccaggacagggtgaatagatatttgtaaagaggaaatgtccaggtagcaaagatccaccagtcatagatttatttgcatggggttttttttttttttttgtacttgtcttgccagagacaagaataaaaggaaatgatttatgtgaaattcacataaaacaaatggcatgtgattgcatgatctgtctatatgaaatagttgtgcctcatccttcctaacaggaaggatggaaagaggaaaatccttttcagctgggtgcggtggctcatgcctgtaattccaacacttcgggaggctgaggcaggtggatcgcctgagctcaggagtttgagaccacccagggcaacatggtgaaaccctgtctctactaaaaatacaaaaaaaaattaaccgagtatggtggcacatgcctccagtcccagctacttgggaggctgaggcaggagaatggcttgagacgccaggtgaagttttcggtgagccgagatcgcatcactgcactccagcttgggctacagagtgagactccatcaaaaaaaaaaataaaaaaaggcttattcatgacttttgtgttccattatatcattaggtactttttctgcatggcttctaatttttctcatttaatgtgttagtatggcaattacattcctaaatattctatgttgaaccattcttgaattcatgggaaaaaaaacctacttggtcatgatgactgtatatatgggtatatgcagtcatatatatacacatgcataaaacatatacgtatatacatatatacatacatatatacacacatatatacacacgtaacatacgtactttttaaatactttgatatattttacttgttgatatttaagataattgcatccatgttaatatatggaattagattacattttccttgcctttctttctttctctctctcctctctcttctcactgtgacatgtatctcttagacaagaagtaggcaaagttgtttttatataaagtaacagaaacaatttaaggtttttatgccagtttgaaaaatcaaagttattagatagatatttaaaccacaaccatttaaaaaggtaaaaatcattcttagtttgcaggcactattaaaacaagtggcagtctgagtgtggcccatgggccaaagtttgctaattcctgtcctagggtcctaagacatagggccattccactggttagaaaatatttatttattccagccaagggaaggctcatttgccaaattaggcattaatgatggcagatacctcactttgttgatgtgaaacatttacagctgaaattctgttgttgttttttttttttccatttgtgtgtcttgtaatttgaaagatctttttaatggggaaaaaatagtcttgaggttggaactgcctttcaggaagaaaacttctggggtgattttgacagccaacgatagattgaagcctcctggagtatccaagggtgactggcctcttcaagaggttttgcaagggctcatcccccttctctgtttctgccaggcagtgggggtgagagcaggcctgaagaaagacacctggataataggtcaagcatccagtgggagggtgcggatggcctgaggtgaatctactgcctgcctagagcatataagtagcagatggactaatggacacatgtcattctttcttttcatccttgtcctacccttattaactctgacctctgtgctttttacttttttacttttttccctattgttattttcagattttgtgaaacatggtctcactccatacactgaaatgtaaacagacattttagcagcagataattttaatatgctggactttcctaaagtctttatactacccatgatgaccctggatgtattatccaaaggaggaaatgaccagatgacagtcacacagagaggagccattgcaggatgagcttgaaagttcacccttacctgatgatcatgtaaaataaaaataacattctaagccccccagccatctgaatggacccctcttcctcctggtccagggcattccaaagttaacctgaaaaactagttcaggccatgatgggaggtgggagccagacatgcctcattatacccgcctgccttttgaaattactgctacaacagaccctaagtctgataagagacacttacaatctattatctctgaagcctgcacctggaggcttcatctgcatcataaaactttggtctccacaaccccttatggtaacccagacagtcctttctattggtaataactctttcaaccaattgtcaatcagaaaatctgtgaatccacctagaacttggaagcctggcttccacttgtcctacctttccagactgaaccaatgtacatcttacgtgtattaattgatgctttatgtatccctaaaatgtataaaaccaagttgtggccgggccaccatggccacatgttctcagcatctcctgagggctgtgtcatgaaccattgatcagtcatatctggctcagaataaatctcttcaaatattttgcagtttgactctttttgtgaacaatcacatttgactaccagacatctgaggaactttggagacctcaaagaatcttagagatcttctagctcagcagtttttaaggcttttgtctggggaatacagacccctctgagattctgaggaaaaggaaggattctctttcccccacaaacatagagaaacacaacacacactcaaacacattacatacaacttcagtttcatgaattccctgtgaaccaccatttagtctactttaagaatgcccgatctcctctaatcccctaaatggcctaaggagggtaaggcattagctaagcaagcaatcctttctcttacttcacataggaagacagtgccatctattataaattatgttcaatttctgcacttactgtttagaagtgtctttctacttcataaaattcatgcaacttatactttgctcatatttgattcaaatttttctttgtaaatataaggaagcattcaatatagagaagaagatttaaaggtagtattttctttgttttaagcactgacttataaaaacaaagtttaaaaaaagaaaagtaataaagatgtcctagtattacagaaaaagggttccaatccagaccccaagagagggttcttggatctcatgcaagaaagaattcaggtcaagtccatagagtaaagtgaaagcaagtttattagaaaagtaaaggaataaaagaacagctactccatagacggagccagtcctgagggctgctggttgctcatttttgtggttgtttcttgattatatgctagacaagtggtgaattatccatgcctcccctttttagaccatacaggataaattcctgacgttgccatggcatttgtaaactgtcatgatgttggtgggagtgtagcagtgaggacgaccagagatcactctcgtcaccatcttgggtttggtgggttttagctggtttctttactgcaacctgttttatcagcaagatctttagacctgtatcttgtgctgacctcctatctcttcctgtgacttagaatgccttaaccatctgggaatgcggcccagtagctttcagccttattttacccagctcctattcaagatggagttgctctcgttcaaatgcctatgacactaggagctttagtgtatagcccatttgccaaaaacagtacaagacatgctcttatgagatgttgctaattaatggttccttaaatataattgatttttatttttcactttttgaaagatcaaaaagtatttgatagctgctttatgtaaagctatctgaactggaagtaaacaaataataaaatgtagcagctttctacagaaattcaaatttaaggaatctctggggcaattatatgtaaaactgatgataatttatatctgtgtgtgtgtaaaataacaattctgaaatggcttcatttcaaagcaaaacacacaagtagttagtccaaaatcatacatttctcaaattatgagatccagagaagctgaaagacccaatttaaacaatttaaactctacataagaactgtgaaatactttctcttctttattgtttactcaataatctaaaaataatcagaactagctcactaaatccttttccttttacacctactctgtttagtttaaatggaaaaggctgagatttcacatttgtacatggatttatagtgcttgaagtgaaataatattttctggtttagtggcatttattgcttatcaaatctttaaattttttaaggttatatttacaataattatgtttaattttatatataaaatgaaaattaataagcaaactttggaagagttagccaacttaaagcactattgcttgccttcttttatttttatattttatttttttggagactgagtttcactctttttgcccaggttggagtgcaatggcacagtcttggctcactgtaacctccacctcctgggttcaagtgattctcctgccccagcctcccaagtagctgggattacaggtgcgcgccaccatgcccaggtaatttttatatttttagtagatacagggtttcatcatgttggccaggctggtctcaaactcctgacctcaggtgatctgcctgcctccacctcccaaaatgctggaattacaggcgtgagccaccgcacctggcctgcttgccttcttttagatgtgctctcaacttcaagattttctgtaccatttaacttggaggaagataaattttcttatcttcccccacagatgcagtgtagtgatactggttgtcttcctgcttgggcaggatgcctaagtacttaattgttcggtctctacataagaatcactttgctgaacaatgaaatgcagctgcctctagggtagaatgcagcagctattgagcagcacaagccctactaccggtcagtttggggcctcgcaaggggaagagtgcaaatccatttccaaaaaaaagggaagaaattgacagccaatggaatttttagtttttgcaaattggctctgccccaccaatattctcttttagtccatgtcatctctttcataaatttagtatgttttcttccttctttcttgacagtcttttttttttttgtcttctgccagttttcctccccctttctagttaattcccctaattgtcagcaattgtgcttagtaatttttggtttcaagtcagctctcaacaagagttgtctcttgaatatttagaattaatcttgacattttatgtccctctgtgcatgctgatggaggttctttaacttgctgagggagaacaagtggcttatagaaatcataggtctgccagaggctggaaactgtgccaatggtggccagggacagaatcagagtcttagagagttttctagttaattagatttggtcacatgacctttgtgactcaaccaatggcaataaataatgagacacacaatcccaggccagaagccttctgctagtatatctagttagcagaagtggaatctctactaggattatgactgcagggccttcgtcaactgcaccttttccagaaatccctcttaagctttcccaatgtaaacttatttctctcttctctgaacttctctggacttcttttattctttatacttggaaactcatcacacataattgtgtggattccttttgttaaactctgcagaggaatcttcagtgggaagagtggcttaccttcttatcccctaattttcactctgtcttaatttttacataaatttgatcattcttttccctaccatgttcatctccaggacttccctcccttcactgtcctccctctactatgtttctccatgtcttccctgccaacatgtatcttctcaaaatgcacacacatacatgcttatctcagtacagttaatagaatttgttcattttcccaactggattgtaaagagggtttcttaactttcacagatctatcacattaaattgcctacagttgttactaaaaactcttgagatatatatggaataattcattcaacatttattgagccttactttgtgcatttcacagcagcttcttgccaagaagaaacctatgtattttgaagttctggtgttaaacaactgtattttagctttatgattaaattaaaatgaggattaagtttttcttctgctcatattgaaataagtgactagaatagatcacggtttatatggacaggaatctcacttagcaaacagtaggctgatgattgacagcaccatcaccctctccctgttcctcaaactctacttccagtggtcatgtcttaggacaagatacttattcagaaccagagctggttttatgctactatttcttaatattccacaggcttattgttggttaaagacctgcatattcaaatgcctctaagttaagcttgatgtattccccaactctaaaggccgtagttcccctgggcacagttatgaccacgggaacttctcttgtaacactcagcctgcaggtaatttaactcatgattttatgtagcagctctaccctggtgactcttgcatttgaacctttgcctgtatctttcctgagaactacagactcacatatccaactgcctactagatagctctgttgggatgtctaggagacatatcaaacttaagaagttcaaagccaaatttctgtttttttctccccaaacctgctcttgccccagttttctgtgtatcagttgtaatttctcaggttgtatttggggtcatactcaactcctctctctaataaccctcatctcttctatcttcaaactcttggctctaccttcaatatgtactcagaatttatatgtagaatgtaatatattcaattgatggcatatcatgtagcagagaatgaaatatatatatatatatataaaaacatggatgaatctcataaatgtaatgttgaaaaaaagcagtgagccacaaatatacaacctatgcttttatctatataaaggaaaaaaacaggcgaaacttacttatgctattagaagtcaggttgcccgtgaagcttagtgactgggaggcattgtatgggagcttccagatgtttacttggtcaaaattaagctatatattgatgatatgtgtacttttttgtatatgatacctatgttaaaataatatggacatgtctttctacctctctgatccaaacaacgccatctcttaaccggatcctggggatggcctcctatttgcttctctttctgccaccatgctctcctcagtgtgtagccagagtgatcttctaatatgtaactgggtttgtgccacttctgttcagaagttgccaatggctctccatcttttgcaaggtggaagccaaaggccttacaggccccacctgttctgttgtactgtgcttagttctctggatttacttccccttactcacatcccttctttctgggctccagccacattgaccacagagttcattgatgccaaccatctttcatcctcgggacatttctgctgtcttgtgaccctaacttaactctgtccctaaatgcatttaggattttctccctcggtccttctgatctctgctgtagttttttcttaccagcgaggcctcccatgaccatcctgtatgaaatagcacctctgctgatctcacccatgttaacacactttgctttttttccccacaggaaaatgattctatgaaaagctgtatttataatttgttattatctgttatttttctatattttccagaatatttaatccatgggggcagggatatttagtgtgtgtttgtttggtgccttcctttttgtattttcagtgcctagagaagtgcctgacacacagctagctggactttagtgaatatttgttgaataaataaaaacaactgggaaacaggtactccattgtgattgagaaaatgagcaagaactacagtacttactagatcctatgatagggtatttctaactttgtaagtatatcccaaagaaaaaaatgaaagaaatagccacttgcatgttattgtttgtatgctcttcacaattgctatatacaaaggctaacaaaagggaaaactcagctaaatggttctaaattgagggaagaaggaggtgggcaggagagaagatcccaatctcctgttaagggtggtcttgcatattccatagggaaacacattgttattgattggaagaggtcttatcccatttcccatgttgaaatatgaaaatgtttgaaaaacactaacaagtgcttcagtgtgatttaatacatatggaaaacagatgaccatgttaacatgaaatgatatttaagtagaaaagcagaataaagaatagtaagtagacatggtttttttttattttattcattaaaattaataaaggtggaaagaataatttaattaagatataagtttaatttttgactcaaaatgcagaacttcagctgataaattttccaatagaaaatgacctttttcccccaattttatgcatgtactataaaatgtaaggtaatggattaaacacatcctactttaagatttactgttgaaacacacgtcttatttttacctcaagaataaatgaattaagtaaagatatttttttttcttttttggatgtgttgggggaataggcattctttccagaagagtgggcagaggtgaaactagttgccacactttaattataacgatagtagactctcctcaggtacgttagaatacactaagaaattcagctaagatttacctgtctttacactgcaacactagagaactttctagaggagtaccatcccatacctatttaattgtgatgcttgctaatatgtcattcagcaacaatttcttataagtactccccaacctgctactttttgcttcatctcccattgtctaacaaatttaatttcccaggatttctcaacctgacaatccattgtcaccaaataaatacaatcattcctgcctctgaactgtttatcgatctgggaacttcactttcctcttttcttactttaaatgcccatttttgtcttcaggacattgaatgatccatcagatccaatccctgccttggcattatctcccctattattcaatccatgccttggcattatctcctctataatctcactcattcctgcctctgtgttcttcacccttactgaaaactcattttaattaattataaagaattgtgtccaaaaccagtaagatgacttccttgaaacaggtgctaaatgatcctcgcttcaaaataatcaccgcctttctttgcattgccatgattttaaaaataaattatattattgcacactgtatttacttcatttgcttttgtctttatatacttataacttttttcaactttctattttagcaacttcataaaaaatcgagaccatatgatctgatctttatagtattaaagtgctatacaattaggggagcccagtgagttagctgagactttttgtaatacataatgcagaagacacagggaggagtagtaaagatgagcttagcagggttgtttgtgttgttcataaaagatgaagtaagcaagttggttaatttaaaaaaaattatagttattatcattgtgttcatttcctattgctactgcaacatattactacccgcttattggcttaaacaatgttaatttattatcttatagttctgaaagtcagaagtttaaaatcagtttcacatgctaaagtcaagatgttggcaggctggttccttctgggaggtgtcagggagaatttatttccttgccttttccaacttttagaggccactgcattccttgtttcgtggccccttttttgcaatagcatcactcctacctctgctaccactgtcacatctccttttatctattgatcctcttacctctgtcttataaagacccttccaatgacactgggcccacctagacaatcctgaaaatcttcccctctccagacctatagtttaaccacacatgcacggtgccttttgctatataaggtaacaaattctcaggttactgggatgaggacatggacatttggtagaaggggcattattttgactatcacaatccctactagtgccaatctcactcacttagatgaatgcgaaagaagttaccctgagtacactagagggtatgtccgacatgtggattttatcactagtgcatgtcactacagacaaatagtttgagagcttctcttttgtgccaaggagtttggaaactttatctgttaggcattggtgaactctcagtgctttccaagcaggtgaagaacctgctcagttctatattttagaaaaataactgatcacagaatgaggttgatgggagctcagactcacgtggtggaaagcctaaactcagaaataatggcaatggaattggagtgcaggcagatgttgcagagacattccagagaggatcctgtgtggacttggaagtgtttgcagagaggtaggaatatagaggataccttttgaagtttttagcttaggtggcagcataagaaatgacaacattaatgaatttgaataaattcagttataaatatctatgagaaatgcctctgtcagtttcagaatcagaggttggcagtcatgttgcagaaaacatactgcactcagatttacaaatatgtattttggacttaactggaaaggttaagggacacctgcttccgtgagaggactccagagtggttgcatgcatgcatacatgtccacatgcatacatgtatacctacaaacatacatatgtatacatgcacatacatccatgcacacaatttactgaccttagtgaccagggcataatagtataaatcatcaaaacttccaggtatcagtgctcttttgaatacagatattgcttccatttcagtctgtgcaggctcaagctcattttataattttgctttgcatacattccatacttagtctcctgtaaatgtaaaagaaacacaaagcaattggaaaaaataaatcctttacaatgcgaaatcatgaagttgtttcttgctctcaaagagtttaatgtctaatggtaagataaacatatgtaataatgatacaccatgtcagctgttaaaaatagtaatagctaatgtttactaagtttaaaccttatgagctcagcactgcttagccttttaaatgtgttagctaattaaatgttacaatcgtcatataaggtggacattgcgtgtaaagtacacaacagagaaaagggtaacagctttattctagtcacgagtcaaacctgtgtgagtcagggaaatgttcctagaggagctagcccttgaaatgagacttcatggatgaggttttacaggtctataaatgtgaaaggctatcaaaagaagaataacattggaaaaagctgagagatttgagaaggcacaatgtgtcagggagtgatgagtgggccagattttaaagtgccagagggagaatggcaacagatgaggcttgccagaaacgggaaggtcagctcacaaaggacattgtgaccagagtggaaggagtttattttgtatgatatggcttatgggaagacaaatgactttgagcaggacagtgagccaattcgatttgcatgtgagccgagtttttattgcagagggaaaaatgcatcccttggggactggggagaggtgaggaagccaggaatcataattagcgctcaggggcctatttcagtagtctaggttaaaaatgatgagaattgtatctatgtggtagtgcaaaggacaaacacgtggcacatttttacggtagagttgagagtgtgtggtgagtggaaatgggaagtggaaggaaaattgggaagtagaggatggtgtccaggggcccctcatcaagactgtgatggtgagaggagagtcaagacttctgggaagatggcatattaatatttggatatgttgcatttgacatgcttcctggctatctggggagaggcctccataggcacttggctatatgggcctgaagctcaaaatatatttggcctaggatttggcaatctgtgatgagagtggatattaatcttctgggagagagtcagccaattagaaaaacagatcatatgaataaagaaaaaggccaagaaagagcacctcagggaatatttacatttggaaatgtacttctagagcaaatgagaatcacaaatagtgatgatgtagtcagcagtacatcagtagtagctgaaatcgtaatagtggatgcaatatcttacgtagaatttgtagaagcagagcagtaagtaaaaagatacaaatgaaacgctggggaagaggaaaagaggaatttccgctaggaactgtttaagagctgttaggaaaattaccaagccaaatggtgtcagagaaaccagtgaaggggaaaggcactagagagagggaggagttgacgatgtcaaaggacgcagaaagggtgagtaaggtaatactgaaaattgctctttgccagttaagagaataattggtaacctttgtgagagtgattggaatatggtggtgagggtaaaatgccaaaaagagtaggtgtagaggtaaatgggatttgagggctatatactaatgaattgaggcgtaatgattgttgattaaataaatgaccttctaagatcttttgaaactaacttcagtgtaatgttagaaatacaatggggttgtgacttttaaatgaaattacttaggaatcagaatgtaaggccagagaataattattgggaccaggtaaattgtaagtagaattatcagttggctaccagttatacctatcattcagtctcctgctattttcttcaacttccagttttgagtaagtgtcccctgatccaatcatagttattgatgtcatttaatgcccctattattgatcgttacttagacttatgcataataagacatagtaaccacttttgacaagccataaatattagggccatataattattttcacctggcttattcctcagaagtagaaattatgaaccattttgcagatcatttagaacatagagaacatatattagctagagctgattaattaaaccttttgtaactttatttcctaagagttgaatgagtcatttattttgaattagtataaacctacttgtattcaacttttgattcatggcttacaaagtatgaatagattgggcacagatataaaattagcccagtgtacttattggtagatttcaaaaactatttaaataatatgtttagcccctacatgaattaatagacataaaaaaggccattcaagatctgttcaatggttgtcactgaatgttgagatgttaacagagtgggaggttggcatttgagctgtggaacaaataagaatctcatgagatcctgaagccctaaagatgaatccagtttatttttcccatttctctcccagacatgcctcaaccgatcctttttacctctcctttcatccttccaagccccaaatattttaaaataaagaaatggatttacatatagagacatgtaaacaataataatgggttaggataatgtattgagataatgtttgtttcatcctgcctgcatcttctcttctccattacaagaaggtaattaagcctctgtgcatagttgcttcaggggtagcctttgttaggtaggatttttattttatgaaaacatatactccttgaaagaatcatgctagtggagagaagaaaatggggagaatattacttttgagcttagaggaagtagaaagaagtaggagtattctccaagactgggaagtagatggaggactgggtgttccacaaagaccaagcccatggctgtgctctagcaggatcacaaaggagacatcctccaggtacttctaggggctgcaaattctcagcattcagaaaaattcaaacccatgtgcagcaagggatcatgtgtaatttggacaatgagctgtcatcattctcaaccatctaccagaatctctaccttaggtatagtaaagacacctgtattatttgtcactctacggagaaggacaggtggcctcctgcattcgtaattgaatttcttaagagtcaggtgtaaataaaattaaataatatgacatttttatacaatgcagttgtggatgcaaataccaactagtataattcttccattaaaaaatatattttgagttctaatcagacctattctttctcagctctggaaatatagccgtgtaggtgactggtatgttctctgctttctgaggtcttgtgttagatacagttctctatggatctctcacatttctgcacattgtgtgagcagaggcactgggtactctttgtacctgactagcttttcaaggatgtttgcatagtaaacagccttggaaataaagataatgtctccctctggagcagaggacagacatgtttgctatccataaaaaacagtgtttctctaagctcagagttcctttcctgtaatacagactactgtgtgtacaagcatccacctctgctcagccttgttgccccacaaaactgtggcaggctgactttttagcttgcagtgtaatgtcttagatcctgtgacatgctggatgaaggaaggccttgtgtctggatgtgttcttacaagttctttcttactttacctgcctcattgcttggcattgattcattccaatgagttgcccctaccttttttgggaaaaaaaaaattaagcttgtgaagtttggaaatagtgaagagatctcagactttaggatcacaattattgtcctagattgaacatttcatggttttgtgatattagaaaaatcacttaccattctgccctcagttcctaatcagtaaaacagagatgaggatactcatgacattgtcacttgtgagtactcaacaaaatgacacatttctgaaatccaaagaacctgatcaatgataaaaacgtatatatgcaaaatatttatttctataatacctatactaaacaatgccttgtaattttataagtcatttattacataatccaaattcattggttcttgtactacatttgttcttctacttaacagaaatcactggaacatctatgtgctaagctgtatcaatattttatgcattatatagagagaattttggatggtatgtatgtttagtatgatgccaatccagagaatatgggcctaagtggaatatctctggtgagcagcatggagacattgaaatggaaggtgatgaaggaaaaaagagaagccttgtgttaagagctctgcagcatgtgcagtattgcagtgccagcaagctaacttgccagtttcagaaaagctggtagatgacataagactgcatcaaaaacaaatgcctttattactcacagcgcagaaagcagtgtgagtctcaaattcatgttggatccccttacgctgagtcccatgggggtgagacagagcgactcatgtagagctgggcatgcagtggggctgcaccccaactgagggtacctgagccacaggaagctttatcttttatattggacaggaaacacccatccctgagctaaaggaacctgaatcttttactttgaatagtaaacattccccttaagggagatgttatttttattataggaagtaataagtaaagctggcctgtaccctctctatcttccaaggttttcattatgcaaacatctgtgataagagagtctcgaataaaggggcagttagtgcatatgctcacaagatgtgcaaaaagatcgaagacccatatggataatcgccacccaatatccaggtgaaggggaggcatcttaaagtaaatcttagcctccttcaccattaggtcttgggccaacccaaattatagtgcagaaattacaatacataatcagattttattattgcacaaaaatcactattcttcatttttcttttcatttctttttccaactttccccaataccacacacacacacactcatgcacacacacacacacacacacacacacacacagaagaaggagataaaacatacaagaataagaatgatacaatggactttggggactgtgggaggaaagggtgggaagggggtgagggataaaagactacaaattgcgttaagtgtgtacgattcagggatgggtgcaccaaagtctcacaaatcgccaccaaagaacttactcatgtaaccaaataacacctgttccccaaaaacctgtggaaataaaaaaataaaaaataaaaaaagaagaggaaagaatgagaaggaggttaggagagaaagaaaacaggacttcagagaaaagtaaatgagaaagcagatatagggatttatggtatttcatcatggctttagacatctgttaggttggtgcaaaagtaattgtggtttttgccattatttttaattcttttgcctttacttttaatggcaaaaacagcaattacttttgaagattagaatgcttaatatgaacctcaaagtgagtatttatttattcatttattacatataaaaagctgtacatatataatgtatacagctctgagctctgggataagtaaacatctgagaaactattaccaccatgaaggccataaacatacccatcaccttccaaagtttcctccctgccttttctttctttctttatttattttgcagtaacaaaacttatcataagatctacccgcttagcaagtcttaagcgtacaatattttatcattaattataggttctatgctgtacagtagatctccataacttacttatcttgaataactgaaacgtaaagtgagcatttaagtaatatactccatgaataagagtaagtatgtacattctgccaagatgtaataggtaggataaatctaccttgcttgaaaccaaagtctagtatatctttccatgcatattgtcttcagcatcttacttcaggctccctcttcagttgaccattgagaatgtgaggatatggagccgtgcggttgattttcatgtcctataccggaacaggataggcacaaccttaatatttgtagggcccaggacaatagtacaactggaggcctacctactatatgtctaaatattttatgaatcagtctaactgtgaataaaaatatgttctagcctcatcttgacaagcatactgtcacaatagtgaaaaatatgtgcaatgctatactatttctatgacagaaagtcagcaaagtctcagggtcatctaactttaaatatgactatccagttaggtgttctgttgatgggatgcataagaaataaagtcaatttatacaaactatgatatctttttatataacattgacttttcttgccttcatttcagcaaaattgtatattatgttattaaagattcttacgtaatttgtgttgtgttgagactaattgtcttaaaagatttaaaaatataatagtaaagtacacaaactttaaatatattttccaaaaatcaaaatgaattactataaaaattcaaaatatttttatgtatgtgtttaaaagttattttttataaatattttaaattagcttgcaaaatttaagggtataagaaaaatgtaattaataaatattacatttttaaatcaattgtattaaattaaatttcatttaatttgtttatgaaaagaaattattagcaattgtactattaaatgactttctaattgccaaaataaaggactgtatcatgttttatacaggctacattgcgactcaaatatatgtacaatatgtacaaatttaagaatatagtgaatttaagagtacagtactgatgtgagtgctgcgatattttgtgtaggactcagaaccacagtttgaaagaagagacataaaaagggttactcaacactactatgagaaaatgcatttccatgcaagaatctactgcattcattagtcttttcagtgaaataaatgcttctcttcaaatctccttgtcctcgggtgaaatgtctgtctttaacaacacaaaagagttcctagtatttggactcagttccgttttgttatgaggacattggtcagtatgtctggaaacggtttctctgggccctaaaatgtcttagtcataagaatggatatttagggctgcaagtttcactgtgccagtgctggacacaccagatcccaagtgacagggatgcatctgctctttaatacatttatattttgtatgtttttgatacttggggtactataaaggggccctggacaggcacccgtcttaacactgttaggacagagacagaccttgtcaaacagggagaaaattagatatccaatcttttctggaacttaagaaagattttaatattgtaatccctttaacagctctttaaaagtggcctaaattcaggagaatggcgtgaacccgggaggcggagcttgcagtgagccgagagccgcgattgcgccgctgcattccagcctaggcgacagagcgagactccgtctcaaaaaaaaaaaaaaaaaagtggcctaaactatgcccaagttggtgatataaatatatgcctacaacagcaacaacaaatagaaacaaaaacacataaacagaaaaggaacccagcatatacacttcgtgagaactgactcctgaccacaagcggggcatacaaccagattgccttaaggacacatggaggcaggcagcatccaacgggctcatctctgcccatcagatggagctgtcagatgtgtgatggttagaatggttgcttttgggcaggtccagggtttcaagccaaatatgtgaatcaggttgggaagaaaaatgcatgtagcagcatcagttaggtaatgagaagtggcacagtgtgatcaaagcgggttactaggaatgcaaatgcagatttttccctgtccatgctaaaaagatgcaatccaccccgtctttattatgcattcctgctgtggcctggagtactgtgttagccctccaggagatggaacagtgcagggatgagatagatatgactcatgaagctcagtctagttatgcaggttaaattgatcactttcaatgagagttgccctccctccatagaggcactttttcctttttcacttccagctctgttgccaaaattcccattaaggtcattacattatgtctttaaaagtacctttcaaaatgcaaacaatgtatcacaattgtaaaacattgtcaacataagctattaatgccagagtggtaggaaataggctttttgttgttgtttttgtccacaaaatattggaaggactagaatgagaaagtacctatgtagacatccagtataaagtcaggtggaaggtgggtaggtaggatgtaatggaagatatggagatcaccaaagcccaagcatgcaggcccaggtggtcatctaaaataagcatgattggtctcatttcctttgtttaaatgggagacttcagctttcttaaaattgagtggcttggctgggtgtgatggctcacaactataatcccaacattttgggaggccaaggcgggtggatcacaaagtcaggagttcaagaccagcctgaccaatatgatgaaacctcatctctactaaaaatataaaaaaatagtcaggtgtggtggtgcacacctgttgtcccagcttactcaggaggctgaggcaggagaactgcttgagcccaggaggcagaggttgcagtgagccaagatcacaccactgcactccagcctgggtgacagagcaagactctgtcttaaaaaaaaaaaaaaaaaaatgattggcttaacagaaaaattgcccctgttgtgtttgtacatttagatgttttgatttatggaaataattcatgatgaggagtgaaacattttaaaagtttccattaaatatgttccagtttccttatttgtaaaagttaatggtttattattagatgctttaggattgcactgttctctggggtggattttattaaatgaatcatttattcttcattatttcttaattttttttatatttataccagattttacatgaatggtttctgcatccctcttactgacactgacacaaatttaccctttttctcatatgtatattccctgatagatctttggaatcacccagtctgctggttctccaagcatagtcccaagacctgcagcattctctgggaacttgttagggattcatgttccctgccccatactagaactgctgaatgagacactctggggtgggggcccagcaatctgtattttaactggatattccaagaattctgaatttgtggcctagtccaactcttatgtctccacatcagggaacaggttgaaagcaagatggtactaatcccctaggcatcggactcctactctagtgcttttttgtttgtttgtttcatcactatactaaggtccatgttaagaacacaatgtgagtctcctggtgggtttcaggactttccaatcctcatggatctccaaaatttatcagaaccatctaacagtataataagatatttcttttttccttttattcagttagatttttatctttatttgaaatcttaattattttttaaaaatgcagaataggagatgaagcactggagtgaaaccagttgtagtaaaagccaactaatttatataataagacttttttttttttttttttttttacaaaaatactcattcttgaaagaatagcaagttaattggaagcatctagaaattacgatgtgaccaaaaggggccttcgaagatgactcaaaagaaatctttatcactaattgaagagcatagacagatatttgaatatcaaaaaatgaaagcaaatgtaaaagcattggcacaaatttctgaaagacagggattttgaataagactgaggatatcagactagagtaacacagttttataaaggaaattctccccaggagagtggtttcatttgttttcacttccagaaagtaagaaaagagcagactctggagtcctcaatgaatctcacagtgttccaaggtgatgcatggaaagtacgcatctggcattaaaaacatgtgatctgatttattgttgaagaaaagaggataaattatcctgctatagtacatcttactctcttttgttgttctctctggtgagccccagcccagatttgcaatccaggacccaagggatactttcctaggcagctcctgcctatagttttgggaaagtaaagtcgatgttttgtatgtcagctcacagttataattcgatgcagtctcagatcttgtttttttttttttaatctctgccagcctcattccccctcttcttaaatatgttcatgtatatataaacattgtatgtatgcttatgtatctagatatgtatcgagatgccttattctttttttttaacagggattcctttaattccaaacaccacaccccgcctgtaatatagactgtgatacagagttggcctccacagatgcagactgaagaggaacctttttcatatagtttgagggtttttgttttttctgcaaaaactctcattgccttcttgtccagaaaggcatgtagaaatgagccctattgtattgtggaagaatctcttcttgtacgacaatcaaaaatactgcagaaatttaaatcccccacgattttactgtacataacaaagatttggaggtatcagttaggctgatacatctttggaacagataatgaagcttagaaagtgagagagcaaaaagagctattaccgtaggctttaaattttttcttaaaattgtttagcatcactgaactgaaaggagcttcaaattcacagtcttaatgtcacattagcatattcctttcattctttaaactatatttaatttatttttccacagggttatggtagtgatcattatgaaaatgtattttattttatatgtcataaaaatagcaacatcttagacacagatgtaggtcagtagtcatggtaattacttactctgtagattggcataataatgaccattttgcttagaggggaaaagttcagggatgtgaaactgagtagaaaggagaagcaatcacatgatctgaaaggccaagtgactgatacagtttttcagacattgcataagatttttttcctaaggaacttcacatgcagatggattaatctgtaacttatgtcactatatcagaatttgctaaaagctataattttgtcaaataaaatacaagagaactctttaagatgcagagtatggtgattctaattcaaatttgaaaagaaaatttatttttatatcaagagattttacggtagtttggaaagttagaaaactaagaatttctgggaagctcgcatgttatattataaaagatggctgtgctgcttttggtgcaaaacgctagcccctcacctcttttctaaactccaggcaaatgttctcccttgcattgagatatgtacattcccacctagattcaattctgattccttctctgaatgaacattgacttccttgtcttattctcatttgctattagtattacctttatttgtcaatacctcagtaatatgtgtccaaaattgaaaaatacaggaaatgctaaaaaaaagtcagctcagataatattgacagcagctcctgtcttgtggaagatgaccggtgtcttggggagtttagaggagcccaccagcaacagatcacgtccacctgcagaaggggacaacagccaaggaggatggcgaaagagaggggctccagctctagaggtatgtgatgggagcctgctagagtacactaaaatttaggcaggagcagaagaggaagtgttgagtaatctgtacgttttttgataacatgcctgctgaaagacaattttagtctgatggatgattatttaggggacttaccagatgagcgctaattattgttttgttgcaatgtgatgtgaatctggtcagaaaggcttggatcatttaggtgtcatagaaagtggttatggagatttactgaaaagaactggtcctgaagactttgaaaaatattcagttgttgtctctagattaatatattgggggagctacaaggacattttaacccagcaatacctgaatccagatctgtgctttttgtcacccaagcaaaggtaatagtagtttatgtactaattaaaagctctttagagaaattagaaaggacttgagaaaggttttgctaaatgtaaatttatgagagagggtgaattgttttcaaaaacgttgagagaatggactagatacctcttgcctcttgtgcactccctcattgtcttcagccactgtggtgtgaccagcttcccacagatggaacctaacagcagctagctcagctgcagccagtttctcttgctttctgccccagggtatgcttttgccacgagcttttggaactcttgggggaaaccatctagacattctaagtcaagcatagtggatagttaatgtaatagtggatcgtttatgtgctaattaaatgctctttagagaaactggaaagggcttgagttccaggttattgaggccccttgacaaatgaaggcactagggctaatagataagagctgtttcttccctgccttgggcagatgatgttgagatgcatttttcctgtctctgcagattcccagcagtagcagtgcatacgggggctcacagacccactctatgttaatttccttggttcttgaatacaaaattagagtggatccacttagcagtgtgtagaacccttaaattagttctctaatccatagagtaaaagctattctgggccaggcatggtggctcatgcctgtaatcccagcactttgggaggccaaggcaggcagatcacctgaggtcaggagttcgagaccagcctgaccaacatggggaaaccccttctctactaaaaatataaaaattagccaggcgtggtggcacatgcctgtaatctaagctactcgggaggctgaggcaggagaatcgcttgaacccgggaggcagaggttgcagtgagccaagatcatgccattgcactctagcctgggcaacaagagtgaaactctgtctcaaaaaaaaaaaaaaaaaaaaatgaaaaaagaaagaaagaaaaaaagctattccgatacaaaagaaaaggcagaagcttctgagcttctgactcctcttcccaggataagataaatcagaactagtactgcatcctaggagaaattgcatagattggtgccaccagcaaagacctaaagcacgtagaggctatgctctccctcagtattaccattcattattcttgtatcactcctgaaacaatagagggatcacagaaagcttctaggtataaagggataatatcctaaatgtaaattattgtaacaccagttatatcctcctacagagcatttctttccatttttacaaagtagagctataggagttaattattttaagaaagttctgaagttgccaaatgggtaacattctcagatacttgagtgatttgaggacatcatgccaagtttcattactgcttgtttggtgatccttcctggggccctgatgatccatattcttaggctaagtgaccccaaggttacaaagtgactgaactgcctctggcccagatatgcggctggattacgggccttttcctaccctaggaaggcctctaaagaaaatggtaatgaagttgcctttcaggagtagttgtagatacagaatgaagcaaggagactcaaatattagtgggaaaaaaagacttggaagattaatattatacatttgttttttgcatgaaatgcagattgactgtgtgttcactgatttggtaaaatgtctcagttacatgcttttttgtgtgtgactgtttatgaattgtcagttctggggacagaaagtggttttcaaattactttaggctttattatcttttatttcttgtttctgttcttaatgtgcaagcacaagaaaaagcagaattatgtttcaacaccagctaaatgagatgaaatcagatattggctttaaaacattttaaaaggttaaaagttatataaaaataagttctgtataaatgtaatattacatataatgtaatgaaaaaaatgcaagctttttaataattgtgttatattggtatttatttgcactagcctttcatgacatttctgaaatgtaaattgataacatcattttcagatggaatccactttgaattgtctatttttcacacagttgattttatgttcttcattcatactcttcttttgcaatcctgaaaaaaatgtgtgcttaataaacactttaatgctgagaccagctcagtcagggagaccctaacccagcggcgctagaggaattaagatacacacacagaaatatagaggtgtgaagtgggaaatcaggggtctcccagccttcagagctgagggcccaaacagagatttacccacatatttattaacagcaagccagtcattagcattgtttctatagatatttgactaactaaaagtatcccttatgggaaatgaagggatgggccgaattaaaggaataggttgggctagttaactgcagcagggacacgctcttaaggcacagatcgcttatgctgttgtttgtggcttaaggatgcctttaagcagttttccgccctgggcgggccaggtgttccttgccctcattcccataaacccacaaccttccagtgctggtgttagggccattatgaacatgttacactgctgcagagatttttgtttatggccagttttggggccagtttatggccagattttgggggcttgctcccagcactttaaaccatgatgtagttccttagaattcatttggtctgctgagagaaattatcagacaatttggctatgagcatgtgtataagttttattacaacttcagatgcaaaagaaaacactctagtaggctaagttaaagaaccattctttgtaggaatattttatagggtaggaagatggttagatacttattgttagatggatacaaaagttttttaaaagtctggataaaggtcactagactcttgactaagaggcagctggccatgtggtagttgggccaccagtttctcaaatcaagacataattccattatagttcatcagaaagttgtttttaaaaagatcagaaatgcttatttcttccaacaaataagttaaaattgtaatctcaataatgttcccagatatgggaaaacacacctatttttttcaataattttagcacatttttgtatttatcatacagtgactattcagtcctcaaagaaactatattcatatattgccaatatttaaaaattcctaaaatagtatgtatatcttttaacatataccaaactgctagaaaataaatctaccagatgaagggaaacactgctgattttcttctcttttaaccaaaatcacacagtcacactttattatgtttgcaccctggctggtatttttttgagcaaaatgaaaatagttaaagcaatagaaatataataaaagaaaatatatagttcttatttggagtagttgaacttttcttgcagcagtggccaacttcttttctgtgatgcaaaattgaagcaaattttgaggttaagagcctgagtggggaaaattaatggaatttatagtttgacttaatctgtgtcatgaaatgtgagcatagattattctaggaaggattgtaacctactattttttttatatatttaagtaataaaatgagaaaatatacataagtttagatattgaaaagccattattgtctgtgaaaattttagaccatggattagagattgagaaatatcttctttgataatgccaaaaattaaaatgcaagttatagcactttaatggatggcatagagagaaccagttttaaaaccgatttaagaaaatgttttgaacattttaaaagtctcagttctgagtagcacaagtgtcagagaaatcttttaaggggaaattgcccctgtgaagagtcttgaagaagagcaagaatgagctgggccaaatgggaaggaggggagcggggtcaccatgaccaaaggagctgggttgtatataggaaggcttgtgggaagtgcattattaattgaacatcaaatgcttttatggtataccttaagaagaagctggaaggataagttgtagctaggaaaaggcctgttctttttgacgattgtgtaataagcccaaggggactagagaatgagtcccctgtcccaccaagcaaaggttgaatattcctggtctgaaatgcttaggaccagaaatgtttcagattttgcacatttttagattttgaaatatttgcattatataatgggatagcttaaggataggaccaaagtctaaacatgaaatgtcttcgtttcatctgctcctagtgaaggttattttatacaatattttaaaataattttgtgcgtggaacaaagttttgactgtgttttgactgatgcctgtcacatgaggtcaggtgtgaaattttccacatgtggcatttttattagcactcaagaagttttggattttggagcatttcagatttcagatttatggattaggcatgctcaacttcttttatatttgaataataatagcagtacgttactgagctcattgtctcagaaggtaattttggctgtgactcctgttttgctgagtgcagtgaagagtattaagagatgataagttggctgggcacggtggctcatgcctgtaatcccagcactttgggaggctgagatgggtggatcacgaggtcaggagatcgagaccatcctggctaacacagtgaaaccccgtttctactaaaaatacaaaaaaattagctgggcatggtggcgggcacctgtagtcccagctacttgggaggctgaggcaggagaatggcgtgaacctgggaggcggagcttgcagtgagccgagattgcaccactgcacttcggcctgggcgacagagcaagactgtgtctcaaaaaaaaaaaaagataagtttataagaaaagaaagaatagcctataattttcaaagattagtaggttaaaaattatcatttcaacatgacttttgcatgtaagttttccatatggtgtcagtataaattctctttcctgcttctctcaaactctttagttagttatacattcctcactactactatagattcaaatgccatgttgcagtagttaactctaatttattatgggcacaaaatggggactaaggccacccattagggctatgcacccattggagttttatttaaaaaaaaaatagacattttatagttaccaaaaagcttctaagagtacgtgaagggagcatattggcatttcaggtagatgacttgggaggcaacttagaggacgttttgaaggtggagagagaggtgtatgtgttcagacgacttgcacaaacatctggataatggaagaattgattcctacagtgttatgaataaaatagagaatgaagttttatgttaaaagagttggcttggaggagttactgggaagaaagggagaggaaggtgactgggacccttccaacttctgccctaccctgtacctgtcccctcattgtccgcaggtgacttagacttccctgccatcctgagcaaacagagggtaccatgtgcacactacctcctcccatgttctctggatctcagaaccctgcgactgccccagtctcccacgtttgcctctggctttgcctcttcctccgagctgagttgtcagctggaaaactagtggtctcttgggggttgcttctgtgtacaacctgccccttcctcctgcttgaaagttatagcatctctgggataagtctcttcttgagttgagatcatattttcatttattatcccccacgtgcctcatataatagagactcagtaaaggtctgatcaagctaaatgccaaatccccttcttatggatatcttattcctgagcaactgacatgctcaagcattctttatcctaaaacaaaactcctttcctgagtcctattcctccaacgcccctgtttctctttattcccaaatggactcagtgtagcttacctttgacttctctgctctctccctggtctccttcactcttacacttccaggccacctttctttactgttattttaatgaaaattgctctcactttgatcccttaagaacactttttttaaatacaaatatatttttggtttgctcatccattctactagactgggaattatttttcttttgtgttacctcctatttctcttctttgtagattcatgatttttatcctccaatgttcttatcccttgtttcccaaaaagacaactcaataaatcctctttctttattgtttgacttttataacatttaaagtgatgtttatggagggttaaaatcaagcatatggtttctttggattttttgctaaattagcctttttccaaaatcttcattttttcatattaaaaacatatttctgcatcttaattttaagcattttttagccttaaaaatagtttaaactgttcctagtaagtgaaaacatgctcttttaaatttcacttgactgaatgcattgttaattcttccagacttagtgaatttattatattttattcagtgttcaaacattatattagctctttgaaagttattaaagtttcttttcaaaaaatgaattaaagtgttacattgaatgaatagcagttacattacacatttaaggaagaaaagtgctgatgtatttaaaatcatttactgaagttacagctgtcccatttggctttaaaaagcacaatgctattatgtgaattgtaaatactaagatattgttctgaggggcaaaaaaaagctaagactgttagaggaaaattatagtcttctagtatggtaactggatttcctgtcgatttacatttatgaaacttcttactttgatatcaagaaattataagtagataacctaaacttccaaaataggatcacttttcagatttttcaagtagctgattgctacaatcagctgtctttaaggactcatcatgatctatgatattaaattttcctttacaaaaattactttttacgtgacatttaacttgtaaaacgtagtatttataattgaaatgctgatgagagtaatttaaagtatttcagaacactttctctacagataatttgtcttcaaattcttgccctagcttacaatgccctgtatgattgagaccttatctactgtgccagttgggttcagcagagttcaaaatgcaaaatattgggggttgcatgtatgaaagaggagaagggagaaggaggaaggactactgggtagtgagggccttacactgtgttgctgttcagaaaatatgttggcgaggccaatgaggagttccattgccaaaattgccctttggaggagtcattcattaagcaaaaatggttgggctctactcattaactgaagttgcttggggaaagcctgtcatagcttgaaggccatagtcaatcccaaagcatctgaagctagagctatcaccgaattcttgcttatcttttttattttctttacagtgtctttgaaagagaatacttttttatgtttataaagtccggtttgtcaattctctattcttttatgaatcatgattttggttttacatttaagaaatctttgcctaacacaaggtcacaacaattttttttcctacgagttttatagttttaagcattacatttagatttttaatttattttgagctaatttttataggcaaatttggggtcaaggttaatgtttttataaatggatttcatctttgtcatcatcttttttttttattatactttaagttctgggatacatgtgcagaatgtgcaggtttgttacataggtatacacgtgccatggtggtttgctgcacccatcaaaccatcatctacattaggtatttctcctaatgctatccctcctctggtcccccatcccccaacagaccctggtgtgtgatgttcccctccctgtgtccatgtgttctcattgctcaactcccacttatgagtgagaacatgcggtgtttggttttctgttcctgtgttagtttgatgagaatgatggtgtccagcttcatccatgtccctgcaaaggacatgaactcatccttttatatggctgcatggtattccatggtggatatgtgccacattttctttatccagtctaccattcatgggcgtttgggttggttccaagtcttttctattgtaaatggtgctgtgataaacatatgtgtgcacgtgtctttataggagaatgatttataatcctttgggtatacacccagtaatgggattgcggggtcaaatgatatttctggttctagatccttgaggaatcgccacattgtcttccacaatagttgaactaatttatacttccactaacagtgtaaaagcattcctatttctccacatccgctccagcatctgttgtttcctgactttttaataattgccactgtaactggcatgagatgttatctcatgtggttttgatttgcatttctctaatgaccagtgatggtgagctttttttcatatgtttcttagctgcataaatgtcttcttttgagaagtgtctattcatatcctttgcccatcttttggtggggtggtttttttcttgtaaatttgtttaagttctttgtagattctggatattagccctttgtcagatagatagattgcaaaaattttctcccattctgtaggttgcctatcactctgatgatagtttcttttgctatgcagaagctctttagtttaattagatcccgtttgtcaattttggcttttgttgccattacttttggtgttttagtcatggattctttgcccatgcctacgtcctgaatggtatggcctaggttttcttcttgtgtttttagagctcctgaaggaagcactaaatacggaaaggaaaaaccagtaccagccactgcaaaaacataccaaatagtaaaaccatcgacactataaagaaactgcatcaactaatgggcgaaataaccagctagcatcataatgacaggatcaaattcacaagtaacaatattaaccttaaatgtaaatgggctaaatgccccaattaaaagacatcatcatttcttagagactatctgtgttagtccgttttcatgctgctgataaagacataactgagactgggtaatttattaaaaaaagaaaaagaggtttaagggactcatagttccacatgggtggggaggcctcacaatcatggcagaaggcaaaaggtcttacatcacagttggcgagggagaatgagagccaagcgaaagagaaacgcccataaaaccattagatctcgtgagacttattgactactactaggagaacagtatgggggaaaccgccccatgattcatttatctccccctgggtccctcccacaacatgagatgagatttgggtggggacacagccataccatatcactatccttttgccattgaattgccttttcaccttttcttttcttttctttttttttttttgttatactttaagttttagggtacatgtgcacaatgtacaggttagttacatatgtatacatgtgccatgttggtgtgctgcacccattaactcatcatttagcattaggtatatctcctaatgctatacctcccccctccccccactccacaacaggccctggtgtgtgatgttccctttcctgtgtccatgtgttctcatttttcaattcccacctatgagtgagaacatgcagtgtttggttttttgtccttcagatagtttgctgagaatgatggtttccagctttatccatgtccctacaaaggacatgaactcatcattttttatggctgcatagtattccatggtgtatatatgccacattttcttaatccagtctatcattgttggacatttgggttggttccaagtctttgctattgtgaatagtgccgcaataaacatacgtgtgcatgtgtctttatagcagcatgatttataatcctttgggtatatacccagtaatgggatggctgggtcaaatggtatttctagttctagatccctgagggatcgccacactgacttccacaatggttgaactagtttacagtcccaccaacagtgtaaaagtgttcctatttctgcacaacctctccagcacctgttgtttcctgactttttaatgatcgccattctaactggtgtgagatggtatctcattgtggttttgatttgcatttctctgatgtccagtgatgatgagcattttttcatgtgtcttttggctgcataaatgtcttcttttgaggagtgtctgttgatatgcttcacccactttttgatggggttgtttgtttttttcttgtaaatttgagttcattgtagattctggatattagccctttgtcagatgagtagattgcagaaattttctcccattctgtaggttgcctgtccactcagatggtagtttctttcgccttttcaccttttctaaaagtcaattgatcatacatgtaaggatctatttttagaatgtgttctgttgcatcaatttatatgtccatacctttgccaataccacactgtattgattattgtatctttataagaatcttgaaatcaagtaatgccttctaactttgttcttttttcaaaattggttttgggtatttgagtttctttgcttttctacataatttttaaaatcagcttttttatttctaagaaaaggaagaattctgctatgattcatcctgggattatagtcaatctatggatctatctggggagaactgacaccttaacattattaaaactcccagtccatgaacacaatatatctcttaatttgtttaggtcttttaaaatttctcatcagctttgaagttttcaacatacagatcttgtgtgtatttcctgaaaggtatacttaaatattttggctgctgttttaaatgatacttttaaaaaatttcgatttccaattgtttactgattctatatagaaatacaatagtttagttttgtgtgcatgtatgcatgtatgcgtgaattgaccttatatcctgtgaccttctaaatttaagtattatttccaatgtcattttttgtagattctttgagatttttctacattgacaactctgttatcttcaaatagttgcagttttatttctgttttttcattctatattcttttctttttcttgactattgcactggctaggacttccattatcatggtgaatagaagtggttaagtgcagtcatccttaccttgttcctgatattagagagacagcattcagtcttttgtctttaagtaagatgttagctgtagttttaactgagattcctttattgggtttaggaaatctcctattgcatgtttgaggagtcactagcctgaaatgatgttaaatatttttcagcggcatttatttgcatctattgcaatgatcacaatgatcacagtaaaaggaaatgtaaaaaatggtcccataaagatttcatggtcaagcttattttctttgccctaatatataagaaaccttatgatctcacccatgcctacatttctctaaccttgtcattcttcacatgcatcttcggctgttttggtaaaaggaattgcttacatttatctgaatatattatgttcatatctagcagtgatatttgtagtaaatgctgtactttgtcacccagatttctcctgaagcataaaagacctagtccccaacctgagagacctgctgggtgatagacctcagctgtaagccctccccaagagttaccttctgatggaaagtgccaccttaagtaggtcatgccaacttccctggaacgtcctatgtctaatgcagagagagaaagctcagcctccacaccccaaagagggacagtaacactccaggtgcaattctgaaggagaccagtccaacttcacaggtgcccatagggtgagtttacaccttgttaccactagttagactggttagccactgcagttaggtgactgcagtgacagttttcccatagatgaggggtttcccaggacatgagactttcagtgctaaaagtaggaaagtcctgggtaaagcagattgactttgtcacccaaaatttcaaagcctgactcttctctaaaatcctgctttgctcctttctaccacagttgctgatcctgggcacactccttgcttaacttcactcattctaatctctgccctggcacatgagtgcaaaaatagacatcagaaggacaaaagaagaagcaaggagaccatcaagggaggcaattgcattattcccacagagaaatttatgaaagtaacaggcctaggtcagtgacagcaaagatggaagacaggtagattcaagatccattttacagatcaagctaataagtcttattgatgaattgaattatggatcctggaagcctgttcagagttgaggttgaacagatgagcaaatggtggcatcatttactgaaatggggaatataatgatgattcactataccttcaattcaatttgggatgtgtgagtggagatttcaagtagacgtaaagttctagagctaaagagaggtctggattggtggtacagatttgagagacagtgacattcgggttataatttaaatcacaggagcaaataggaccctcagaagagagttcaagagtttcaagttctttcgagaatctgatgaaagctaaggaccttcttttaagaaaaaagcacactcttataaaaatgtctacattagtttcctagagtttgcatgacaatgatataaatgggatactttaaaacaacagaaatatattgttttgtgcttctggaggctagaagtttgaagtcaaggtgtttgcaggggcatgctccctctgaaacctgcaggggaggattctttcttgacttttcttggctccttgtggtggctgtcaatcctataccttggcttgcagctgcatcgctccaatctctgcctttgttgtcacatggcagtcttctctttttgtgtctgccctcttcttaaaaggacagcagtcacttaagactaggggaccaccctaacctactaagacttcatcttaactaatacatgagtgctcccccaacttttatatatatgatttcatcgtgaggtccgacaaaactttggagacacaactgaacccataagaatttttcaaaaatattttttacttttttgtaggttattggggtacaggtggtatttggttacatgactaaattctttagtggtgatttgtgagattttggtgcaccctgcacctatcacccaagcaatatacactgcaccgtatttgtagtcttttatccctcgccacctctcacctttccctccaaatccccaaagtccattgtatgcctttgcatcctcatagcttagctcccacacatcaatgagaacatacaatatttggttttccattcctgagttacttcatttagaataatagtctccaatttcttccagctcactgcaaatgccattaattcattccttttcatggctgtgtagtattccattatatatgtgtgtatacacacacacacacacacacacacacacacatatatatatatatcacagtttctttatccactcattgattgatgggcatttgtgttggttccacgatcattcaattgtgaattgtgctgctataaacatgcatgtgcgagtatctttttcatgtactggcctcttttcctctgggtaggtgcccagtaatgagattgctggatcaaatggtagtacttttagttctttaagtaatctccacactgttttacatagtgactgtactagtttacattcctaccagcagtgtagaagtgttccctgatgaccgcatccatgccaacatctactgtcttttgattttttgattatggccattctggtgggagtaaggtggtatcacattgtggttttgatttgcatttccctaattattggtgatgttgagcattttttcacatgttggttggccatttttgtatcttctttggagagttgtctattcatgtccttagggcacttttgatgggattattttattcttactgagttgtttgagtctgttgtagattttggatattcgttctttgtcagatgtatagattgtgaagattttctcccactctgtggtttgtctgtttactctgctgactgttcttttgctgtacaaaagctctttagtttaattaagtcgcaactatttatctttgtttttattgcatttgcttttgggttcctgataatgaaatccttgcctaagccaatgtctaggagggttttttcaatgttatcattgagaatttttatagtttcacgacttagatttaagcccttaatccatcttgagttgatttttgtataaggtgagaaatgaggatccagtttcatgtggctagccaattatcccagcaccatttgttgaaaagaatgtcctttccccactttatgtttttgtttgctttgtcaaagatcagttggctgtatgtattgggtttatttctgggttctctattctgttccattggtctatgtgcctatttttataccagtatcacactgttttggtgacaatggccttatagtatagtttgaaatcaggtggtgtgatgcctccaggtttgttctttcagcttagtcttgctttggctatgcaggctctttttggttccatatgaattttagattttttttttctaattctgggaagaatgatggtggtattttgatgggaattgcattgaatttgtagattgcttttggcagtatggtcattttcacaatattgattgtgcccatccatgagcatggtatgtgtttccatttgtttgtgtcatctatttctttcagcagtgttttgtaattttccttgtagaggtctttcacctccttggttaggtgtattcctaagtattttttttttgtagctattgtaaaaggggtttagttcctgatttgattctctgcttggtcgctgttggtgtatagaagagctactgatttgtgtacattaatcttgtatccagaaattttgctgaattgtttttatcagttctaggagcttgctggaggagtctttagggttttcaaggtaaacaatcatatcgtcagcaatgagtgacagtatgacttcctctttactgatttggatgctctttatttctttctcttgtctggttgctctggctaagacttccagcactatgttgaagaggagtgatgagagtgggcatccttgttttgtttcagttctcagaggaaatgctttcaacttttccccattcagtattatgttggctgtgggtttgtcatagaaaacccataacacttttataccattttaaggattcaaaaatttttcatgtccaacttccagagacataatgctggactcaccaacgtttgaaagatgggtgcaggaagagttaatataaaaagaatgagaagatacaagaagagcaggagcatatatctccttactaggaagccaaaagaaaagagagttcaaagatcaaccccgaggccatggaagaaaagcactgaaaataatcccctgaaaatcaaatgtatgtgttaggttgaccacaggtagctccacacattgctgctgatgatactagcaatacatgttaacattcttggcctttctagatgtcagacactattctaagtactcttaatttgctgaattatttaatcctcacatcaactctgttattattcccattttgtaatgagaaaactagagagttaaaatagcctttttacagtggcatacctagctggcaaaagagcatctcaaaccttacgatgttcaaatcataactttttcccctgtcctaatgtgtacctcctcatgattccccatttcagtcattaaataaacctgccaatcattggcattttgtttctttttttttataggagatattcttttttttattgcctgtttttttaattattattatactttaagttttaggatacatgtgcccaacgtgcaggtttgttacatatgtatacatgtgccatgttggtgtgctgcacccattaactcgtcatttagcattaggtatatcccctaattctatcccttccccctaccacaacctcacaacagtccctggtgtgtgatgtgaggtcatctcttcatttcacttcatgcattaaatgaactcatttttctgataacacaaaccagaaagtgcagaataatgtatttctctctcacttttttttttttttttttttttttttgccattttctgagttaaatcagtgactaaatgtggtcagtctcttgcttaaaatctgtcagtggttctgccttgccatagaataagtagcctgggatcaggctctcgtatttccagtctcactctcaaagcattcctagagggctgcacttccactcctctggcagcactctaaccacattgaaccatgtgttgtatctcaccctttccctgtgctctgtctgtgttgggttttcctcttggcaccaggagacctctcttaatatttcggagcccaactcacaggcaccttctcttatgagatgttcaatggggtcttgcgccaagggcaaaacctagatcgagaacacgagagttgtgccttcaatgtgcatttgattttgtccaagtcagaggatgtaaaaaaggcaggagacaaataaacaggtaacttgactaaaggacagaatattaatgacaggctggtgctgacaacaaattgttgttgagctttaaagaagggagacaaaccattggctggaagtctactccttccaattatattgcaccatcgatgtaaataaccccctctcccaaaaggagagctttatgatgacatgtgatgaagaattttatgctgttctgctaaaatcacatttaccatttcgcatattgggcttcaatttttaatttactcgttttaataagcctcattacttccaaggttatttatacagtgtttaactcctactgggtgtttctttttctgagtcttttttagcttttaagtaatggctgtgattatataattaaagcaaactacagcagattacattaagaagttcactttttttggaagaaggaagtttgctctttgttcactttcatattattcatttttcataatttaatattaccaaagatagtgcataaatattataattagcatatttgttgtttttcttgaatggatattgtgatttacctttgtttttgttttttgtttttttgagacggagtttcgctcttttacccaggctgcagtgcagtgttgtgatcgtggctcactgcagactctgcattccggtttcaagtgattctcctacctcagcctcctgagtagctgggattacaggcgcccgccaccatgcccggcttatttttttttgtatttttagtagagacggggtttcaccatgttggccagtctggtctcgaactgctgaccttgtgatccactcacctcggcctcccaaagtgctgggattacaggtgtgagccaccaagcccggcctgtgatttacctttaaaagactgttaatgatcttcaggtagcactgacaactcctaaaccctgaaatcttgaattttagatcctttattgcttatggtttctcttaggcaaattatgcaaagtttttttctgttgtttttattttaggttttgtttacagttttgctgcaaagtctgtatcatatacttcaggatccaaaatgcaattatatatatatatatatatatatatatggatgtatgtgtatcatattaagtaaactcaagcaaagcactaatagcacacacacacacacacacacacacatacacacaaaagtattgctttatccctatctactgtttctcctccatattctttttctttttttttttttttaattgagacggagtctcactctgtcacccaggctggagtgtagtggtatgatctcggttcactgcaacccctgcctcccaggttcaagcgattttcctgcctcagcctcctgagtagctgggattacaggcatgcgccaccacgcccagctaattttgtatttttagtagagatggggtttctccatgttggtcaggctagtcttgaactcccgacctcaggtgatccgcctgccttggcctcccaaagtgctgggattacaggcacgagccaccatgcccagccttctccattttcagaactgtagagaactccttcctctgtgcgccattacttcctgtgtgtactgctgttatatgacatacacactttcttataacttatgggcttacttctgtctcttctactctttgatacaattttagaatctagaaaattacttgcatttttgtatgtcctttgtacaatacttggggatgataggcacttgcagaatgaatgaatgaatgcctagagtttgttctatgtgtgagtctctcaggtacttgaatgtttgtatgtgtgttaagaatataagactataagaaattcaaatggtggataaaacatttccaaaattaaaataaaagtcaacagaggctagaagggtagtggggagggggagattaagaagaaatggctaatgggtacaaaaatacagttagatagaaggaataagatctagtgttttgtagcacaatagggcaactatagttaacaataattgattgtacatattgtatatttcataataactgaaagagtggaattagaatgttcctaacacaaggaaatgataccacaattaccctgatttgatcattacatattctatgcttgtatcaaaatatcacatgtaccctataaatatatacaactattatatattcataataattaaaaataaaaataaaatgacaatgaaaacaaaacaacaaaaacaagcaatctcatgtaactgtaaggaaaatcttagttcatcgtctagttggtttatttaccactcacatatttgtctgtatatgactgtaaatcctcagataaatatatgtaatatgtgattttaaaaaataagccatatgatgccacatatcaaaaaatgtttaaagtgccacactgtttctaggattatctataacttacagtaatgaaggctatatggttaatcaatggccgttttattgtattctttcttgcatatgtattaattgcccttgttagtgcatcttctattaattctctggaaaatttggctcatacgttattgcatacgtttttgtttttctttttcttagcacctgtggaagttttatcccaattctctagtagcactcaaagcaaggtttactttcaaaagtggaagttcagttgccaagaaacactatgacaatagcaagtactaaaacagatggaagctgtagatttccaagttggctgaaatccttatcttcggaatgtctttcgatttactcataaagattgaagaaatggggaatcttccaatcctagcttccctggagtcaaagtgacatgtttacttctaacttaatgtgtatgcatatatgcactcaacaaattatagcaagtgttcacataattttattgaaaagggaaggaaggaaaaaggaaggaaaagtttgaaattcaccatgtttattttgaaacatgtctgaaagccagtttactggtctttcatcttcaataaatctcatgttcctcagaatgaaatgacttatgcttggaaatattgatgcttagctgcagatctgaaatttggacataggacccctaatttcacattcaatatttacctcatctttcttttcccgttaactgaaatactacatgagaaagggttgttccaaaatgcaattctgtagaaaatttttaatggttgttgtcttttatgtatttcctggaatgcttggttcctttttaatcaatatgtttatacattcatcaagttttcatactactaatataacataaacaaaataaatctcctaataatggcacaaaaattggtaactaaacattttgtagatatctaaatcttttctttagcttgtcacaatgaaaacaaaacaaaacaaatttaggataaaccattaattcccctgcaagataaagataattccttcaataattcattcatttatctattgtgctttaattgtttttattttattttttttagatgaagccttgctctgtcacccaagctggagtgtagtggtgtgatcatagctcactgcagcctaaaacttctaggatcaagtgatcctcttgtctcagcctcccaagtagctgggactacagctgtgcatcaccatttctggctagttttttaatttcatgtagagacatggtctagctatgttgcccagattggtcttgaacttctggcctcaagcagtcctattgccttggcctttcaaagctttaggattacaggcatgagctacagcatcggcctaattgtttttagatgctaaacgcactaccaaaaactgagaagaaaatgaaagttattttgaatgcataaaattagttggacgctagatatataaaaattaaagaataaaaacaagtataagatgcaatttttactgcatgtcaaatatttggcaagagaggaatacatgtaactttccttgaaaaaatgaattataaatttagtttttgaaataacagatatgattggcaggtagaaaatcaaggtgtacatcccatatagaacatatggaacaagaacctggttggaatgtttcttaactggtgtttattctgtacctactacactacattagagagtagcttgaattgatgtttgatcgactgaagcctagagctctatttcactcttgtacatagtttataaacataaaacttaagaaaagtatagcaatggttaacaaaatccttgaagtagaatgatgtattttacttttttcactaatcatttcagttatactttattcactttattccacataaaagaatacaatgtttttgctattataattgctaagatgttacacttcaaaacaaattatctgcctagccttcggtagctttatttcagaaagttgtactaatactaatgagaattcttttgtcagttacttgggtgttgatatttgattccaacggtttttttttttaatttttggttagtgattaattaaaagaaaatcgatgtttaaggaactaatactatattttactatttctctacatgtaaaaaatttcagagccttttgtttctcagaaagttactgtgaatgagctcattacattttgtgctgccaagttagtccagtggacaatttttattcacttaaatatgcctaagaaagtactttatttctgtaaacaaatatgaatatttatgcttagtataaaaatcttatagcactgtgtcaacatcctattctcttcatctcctttatcaaatgtaatttatgttaaatattgtgaaggatacaggaagcatcctccacaccttctcctttgcctctgatttctagtctgcaccaagtctggctcattttgcctccggaatatccctcaaatcattctgcctttttctaccctcagcacctccaattccaaatccctattgctctcttgaccattacagtggtctcttcatatggctattctcatcctccctggccgctagtggccttttctctacactgtaaccaaagggctcttcaagacacacaccttatatctggcctgcagatttaaaacacattaggaatctctctgtacgcttaaagacaaaactcctgagcatagcctataaggccatatatgatctgcctgctctccctcccttcagacacatttcataccccacttgcctaccaccatccccattcagatcaatgatcatacaggtcttccatcccctgaacttgacaggctcttttctgatgtatgctggtcttttgccagatacaatttttttctcttcatcttttagatgtcagtaaaatgtcctttccacagggaagagttccttatcaactttacctgggtcagatgctcccatcatagcatcataacagagcgacgacttttgtctctgttgcaacttttcattagttttatttgctttctggcttctctgcctgtcttccctagtagatggtaagacccagaagacctaagccatatctgcctttacttattatttcattacccaggtataggttataagtggaaagattgtaggatatttgtgaatatctattaagtctgtgaatgataaaaaggctttagattttaaaatctcatgattacaaactgtttaagagacagaaccataatcgtgcatggtattgcgtgctgctagtcccagctacttgggtgactgaggtgggagaatcgcttgagcctgggaggcggaggttgcagtgagctgagatcgcatcactgcactgcagcctgggtcacagagtgagaccccatctcaaaaaaaagaaagaaaaagaaaaggacaaagacaaccaacccatcacatggactacatgtatggcatacctcttaaaccttcagaaaaatagagatagaaacttaaaaattcgtagattctgtggtcaaactctattctgtatacttaaatataaccctgaagaattttatcatttacctacaaatttgtcatctcttcattattatagtaatactgaaatgcagctatatatattggtaatagaaaatgacgttaaaaaataaaggttttttttgtcattttccaatctccttccttaccccacctcacaaatatcaccaattgctctgggtagataaaaaccttactacttggttttatgtttagtcttacttggagagattgaagaagtgtgtttaccgctgaggactgaatataaagactttccaggaagccaaaacagtgctaaatgcaaggacctctgtctgtttagggggaaaaaaaataaaaggcagaaatcacactcaaaagagggaaaggaaatgagatgagatcttgaaaagcatgtagggagaaatgaaaacaagcacagcccagactttatctttttagcagtctaccgtgcttcaacttttgaacatctgagagcccaaataatggtgagtatatcagatctcccctggagtccagttttgatggtgataaaagttgttttcacaacgtgctgctgccagatacagtttctctgaatcacccagaggctaaacaccatcttccttccttctttttttcattttattttgtggttatcatgcctgaagcatgggtcaccatattggaagtaacttttagtagttgtacaagccaataaatgaatgtatccgtgggctgtgttggggtcatagggtgtttttcaagagcatcacgatcaatcttaggatgagacatcagtttgagaacagttagaaccacgtcttgtatttcccagttgtctttccaggagcactgccccagtgcttatgagtctgaaaactactcagtattattatttcccttactttctcaaaatttagtcaagtttggtcaaacagctgacattgctttttcaacttatgtaaaagtaaaaatcaatctaaatgatcttacacaagatattttttaaatgtagaatattctagaggggcaagtgagatcgaacccaaagatcctacattgtatagctgccatggatgcctaaaaatcaatatgatgcactgagatgctttgtgatacagatataccttctaaatcatcaaaaaagttcccctttttttggtatggttttaatatcaaatataatttgttttcaaattcctcaacatttgttaattcttgtgttttgtttttatactttttattaaatatattttagtgccaggcatagtagttcacacctgtaatcccagcacttagggaagctgaggtggaggattgcttgaggacaagggttcagcacaaaccttggcaacatagcgagaccccatatctgcaaaaaattaaaaattagctgggcatggtggaatgcatctgtagtcctatctacttaggaggctgagatgggaagaacgcttgagcccaggagttcaaggctgccggaagctaggattgtgccactgcactccgaccagggtgacagagggagatcctggctccataggattgttgttgatggcataagagagacagagagaaagatagaatggaacatagtgcagtggaaggaggcagtcaatgaatgccattacaggactttaaagtgatgatgctgtcgattttcagattactctgccatgttgaaaattggttggagtagaaatggtggtgcaccagttgggatttttaaaataggtgagataagcgatggttcaaaatagtgacagtgatgattaaataaagtgtggtgtatataaaatatggaggttgcgaggggaaaaaaaaatgaaagatgaattcgaattatctggtttgagcatctaaaggggatagtgttgccattactaaaagggggaagacaaggtgtggaacaggtttgagcagccggggagaggagggaatgcagatttcagtttgagattaagaaggcctatgacactaaaatggaaatatacaaaataatgggaaatacaaatttggaattcagaggcaaggtaagaactggagatctaaatttaggaaatatcatatagatgatatttaaagtcatagatggctaagttgatctaggaaagagaatgtagagagagaaaaaagtgaagaagcttgggaccaagccctgaggatcagaagcatttaggagaagatacaaatactccatttccaattaccttggataaatgaggattgctctatcataatgtactgctgtaaatatcaatgtatcattatacaacatagtaatgctgtatcttatatgatattataatacgttgtgatggaagaactgcaagtgccatcacctctttttgcattgttttgtttgggtctcatagactcacttttgtaaatacgaaaagaagtaccttacaaaatatatcctacacaaaaagtggcgtatatgttagcaagtaaaaataattagatgttagatattctagcctatgcattactctgcatatttgtagtagtcaatgtaaaataaaaagaaaaaaaacagtaattagttgaatcattcagattttataaatgaccatctacatgacatatttcttctttcataagtactattttgagaaacagtgttggaaactaaggggcatttcatgcccataacaaaattcgataacagtcagatgaaattatcaggatgcaaaaagagaaaggatgtactgggtcaaagacaagttatgtggctggagggtaaatgttgtttcttataacttagctctccctatagttccacaattttagtaattggagtagagggcagttatagggatctaaggtaaatgcaatttggcctcaaccaaattaaccaagtacgcatggcctcctggagcaactgcagccactatcatcttcatatctgcatgtcttctgggatctagcaaggaatggagctaacagtgttacaagtcgtaatgccaaagaacagaaaaatgtatgtatgtttgcatctggacacatgcttctatgagaagtttattagataaatgccaatttcttccattaccttcaacttccttcatttcaacaagggctctgtgtgtaggcttctttctgagttcacaagtgtaatcacctccaaacacaatcatcaaggaaagagaatagtggcttattgggacaacttttcatttgggcttaaagagtggtataattcaatgaaagaagataatcggatcacatccggactcaggaagagaaagagagtcattaaactggcttcggagacactggccactttattaacaacaaccaggcttatggcataaatccacatggcatttttcaaggaaattatatttttcaagcaattacctacgtaacaattagactgtaatttttttttgttttgttttttgaggcaaagtcccactctgtcacccaggctggagtgcagtggcatgatctcggctcgctgcaacctccgcctcccaggttcaagtgattcttatgccgcagcctcccgagtagctaggattacaggcgcccgccaccacgcccaactaatttttttatttttagtagaaacagagttttaccacattggccaggctgtctcaaactcctgacctcaggtgatccacccgcctcagcctcccaaagtgctgggattacaggagtgagccactgtgcccggccagattgtaatttttaaaaggcaaataattagaatattttgataagcataagctgaaagttgagcaaaaagtagttggcttgcagacggaaaatccacaaggcgtcatccagaatattagcaagacttaagggagcagggagtcacttatttgatgcaaactgaagaacctcttgttcaaggagcagtgagcctgcatatgggtgatgaccaaggagcatgacacatggaatgcttcatcatctacctgaagagacagctgcagccagaaattgactttacagccagcatttacatagagacttctactgtaaatagaagcaactctgtagatgcccctgaaaggaatatgtatcattatatgccattgggcacaaatatatggttttttttaaaagtcttatgtgtcaacaatacttaacagaggcaaaggaatatgaaaagaaaaaggatttggaatgagtgatttttattatcacactgtcaggtagtcacatgggatgaattgcctggtaaataccaacaaagtttccacaatggagttatgtcaaagcaagttggtattacttcattgttttattttctgaaaaccaaattgtttttataatttttgtctggtccacctgaaacatcatgttcttgagtcttaaagaaactgtctcttatgcattcttttctttgttgatcttttccttaataattgccttttagttatattatcttaaatatattgcgaaatagagtataagcaataacttacatatgaggttaaaggaaagcaatgagaaagtagtaacctgcatcagttctttttgttaaagatctttgcatttgataatttttcccttcaagttgttaatattaaaataacctgaaggtcctttatttttggtttctcatttctatatagaaggcaacactttcaacagattgcctaatgtcatatttgccaataaacctaaaatgcatcattttgagacatatccattatgattattatgacattttatttttgtccatttataagctagagcagcgcaaaataacgcaaatacaactaaaaatgaggaccccgtctgtcatactcagtgcctggcagaaaattaccttcactgtaaaatgaatgtagataatttacttttactatacagagtgatgtcttaaaggagaatgtgagtttagcaggaaagaaagaatactggaaaaacttacattaaagatcagttgcaaagtaatggcattgcctttcagacagccagtaaagcaaaaaggaggaaaatcctaggaatagagtttctgctcttggactaagtgtttactgaaggaaatgcaagagtctgctgaattgaaacactgagagaagaatatgagaattatctgccacatattagctctggttttcaatgcatgcttcttcaactaacaacatcagcatcacctgagaacctgttagaaatgcaaattctcggccccattccagacccattgaaacagaaaatctgtgttttcacaggccctccaggtgattctgatgcactcttaagattgagaaccactggtctgaattgggatagttgtttgaattgcccaggtaaactgcccacattgattagattgactgaagaactgtcagaaacctcaatcttagttgagtctttccttggtggacttattgatgtgtttaagtgaaatgttttcaaacctaccccactcttatgagttatttaagaggggtcagtgtctacttgaagaatgagaacagttgagatctgaccacttgaaaaggaacatgttatccttagttcaagtagttgaatctcatgttttgatgatcagagatagctctgtaggaggaatacagaaggaaattgcttattccttatgtaaaaaccttcccctaggccaggcgcggttggctcatgcctgtaatcccagcactttgggaggccgaggtgggcggatcataaggtcaggagttggagaccagcctggctaatatggtgaaaccccgtctcaactaaaactacacacacacacacacacacacacacacacacacacacacacacacacacacacagacacaaagccgggcgagatggcgggcgcctgtagtcccagctactccagaggttgaggcaggagaatcgcttgatctcgggagacagaggtttcagtgagctgagatcgcgccattgcactccaggctgggtgacagagcgagactccatctcaaataaaataattaaaaaaaagaaaaccttcccctataaagtgtcttttattcacctgcttactcatgtctgtttttaaaaaagaggagtgcgtattcctcgtagggagatttctttttctttcttatttatttatttatttatttatttatttatttatttatttttgagacggagtctcgctctgtcgcccaggctggagtgcagtggcgcaatctcggctcactgcaagctccgcctcccgggttcacgccgttgtcctgcctcagcctcccgagtagctgggactacaggcgcctgccaccacgcccggctaagtttttttctatttttagtagagatggggtttcaaacatggcccaaatacatgttaaggtataagggaccttattccatttaatgatatcaagttttgattgactaggtctcagtgctgctagaagctgaccctgggaaaaggaattcaggacaagtttatttaggagacgatgcggacctggagactgagagagacgagggcagggagccagcacagcttctgtatgtacctgggaacctctggggtgcaatacgaaacatgtctcaagttatcctacaagagtacataagggagatagagtatttattcagtttattatcaactcctgtcattggtgacaggctggcagaggatgtagagtgcatttgtcttctgcttccactttggacttcagagagacagccatgggcaaagagtcctggcactgacttggaagtgggcaggcaggtcaaagggaagttctggggaggatgggccacgcatggcagcatctgctccgcagtgggagacggtagaatgtaggtaggtgctagggaatcataggccagtggatgcctaaaaggagaagtggagtgggctaaaaaaaatttcaaaaacaaaacaagaatcctaggactctctaagggaaacttggtctacttcacagtgttgcccaggtatgatcctggcactcgtcatccacgagcaattatttaatgttcacctgcacttgacattgtgatccaccccaggaagataatgaaagcaatatggcttctcgcctgaggtgtctgacaagctggtctagcagcaggaaggagaaagctggagctcccggcatccgttcaaaatgacaaatggaggctgtaaaaagaatgggcctggtgtttatggaggctacaaattaaatgcaacctgcccaggttcaatccgatgcccgtttctattagcatatactgacacttctcagagatttaccctgtgagtctccaaagatattttattattcagtgcctgccagaaaactaagcttggtgtaatgtaggacgtgtatattatgaaatattaaaattattaattcatgataattgaaaaaggtgctagtggtagctggcttctctaaatacatttaattacaaatatgacattgccattcttgtccccacccctcttttttcctcttctcaatgcataattttgaaaaccataaattactgtcattttgatcaatacaaacttcggccaaattactatagtttgcttaatcattttattttagaaaaaaattctgttttctcattataaatttacaagtttctaccagtagattaagatttttttttacattaactgttaaattttggttttactccatagactaaaaaatattaaaataaatttggaaataaggaaattaagaaaatctttttctcctcgaggtttgtatggtagagttattttaaatctgtttttcaaattttcttttcttatgctaactccagcgtaatcatatttacaatattttcactctaaagccttgcgtgattcagccccttaactataacagcccagaattccttttcaaatactttttttttaatgttcttagataaacaaggtgcttttgtctgtgttgcttcacatagcttaagaatcattgactccttcccacaattttgccttaatacaatttaactccaaaatcatatcaggaaatatgataactcatttgggtagtgctctagcttttcttttataaagattgttgcgaggtaattggtaattcagctatttcctcatgcctcatttccaattcccgctgtcatttttgtagatggattcttttgttctcggtgtttattcactgagagtacacattttttttttaaatcgttaccaaagtaatttcaatcttctacccttcaattaaaaaaaaaagtttgaattccaatatttatttgtatttcctgcttagttattttggcctctaaatcgttacaaataatccagtaaatttcaagcagatgatgaataatttctgcattttgttgggttttttatttgttacatgaacatttccagttttctttaataaccttctcaggcatatgaaaccacattgtagttcactttgtctttaaagcatttttctctcaagtatttggctctaagataaagtgcctgcagtcattttcctgttaagtttttcagttttcagtcccatactcattccctgtgtgagatacccccaacttcaatctcatctatcacacttggcacagttctgaaatggactgaacggcctgtgtcgcctatggccatgttccatgtgctacaaactgtgaaaggaaaccctcctccactacctagaggaatttgaaagtgttccatagctattacctgaaacaatacgtgattaatttcctatggtgaatattctgacttggattgtggcctctctgattttataaagcatttactaatcctgtgctctggattttcgggcagatttgttgaattaacagaattgcctatactttttccttaacttccacctgaggatgctaatttcttggggcaattaaattacaaatatgctttctcccataaatattatgccatttacattgatatggcctgttttttgtctttcctagcctttaataacttgacagttttctggtgtgcagtttctggccattatctttatatggatagttcagtcattggttgtctcatgctttgttttgctgcaagagaccttgagagagactgagtgtcagccctttgtcttcatgtgcatccaaacaaaagcaggcctgtttgtgatttcatttcagccttgagtcacagtgcatgcattcctgaatcaatgaatattaaatggatgagcatttgttgatggcttcctgtgtgtttgcacaaggcttcgcagtggttattcaagagtgccagtaccagatgtgactctgtcaacagtatatccagacagttctccttcgaccattgtgtttttactattctcgtaaattttaaaccttatttgttttccattgctactgattacagttacccctttttacttgttttgttcttagaaaatgaaactgatttaaatattagccaacagtaaagctttaggaaaggtaaatttgtaaacatagtgatatacgtataaattaggaggctcaccaaatacaaacagaaagaatgtaaggcatgtgattacctggactgtcttctggcatttgattttgagaatttcctcaaaagctcaatattccaattcgttggggtttctaaacctgagtttggaatccaattctgtggatcacaagataatttttactgtggctgaaaaacggagttatatcagaaaggtaggctagccctaggcaaaatagtgaagcagtaaaactttgtctttccagggccattgcacttctgtctgcttgtctttaggagttagcctaagaactcaatgccttttttttctttcccttcactacacaggaattcctgcctttgtcagacttcttgcctagtcaaaagtaatgctttcagcatccttctctcttttccttgatagtgaaatttagtgaaaattgtcagttaggaactagtcctagtaatcattaccctttctagataacacactcttcagacattaacctggaggattgaaatcatcctagaaggctggtgaggaaaatcctgccacttagtaaaactcgatttcttgctcctcatggcatgccacacaaaaagccaatgtactcatactggtacatcactatatcatcatgttattgccaaataggaaccagtaaaacaagacaaacagatattcttggaagagctctctttctctttcttaacctctaccatagagcagtcttgccatgaagaatcctttggtttcatttttgccatatatgcatccattcataaatagtacatattattatttgaaacttctttaatattttcattagtaatattatattgaatgtatcgtttaccatttgcactttttctaaactagttcattttctaaactagctgcatttttctaaactagttcattctttataaattccttgttccattggacacataaattaactattttcttactgttggaattttgagatgtttccaagttttgcttgaaacacacaattgcactaaacaatttctgctgcacatttccttgtggagaagtatgagagtgtcttgtaggaatttatttagaagtagaattgttaaataatatagcttatcaataagtgtaagttctaagagttaacctgaaacttgctttcctgggacagtgacactaatttgtttttagatctttgcctttttttttcttataggctgactaaaagtataattgatgagttctagagtatctaacatttatctttagtagttgtattctctagtagtggatattgtattgtattatccagtagtagatattctctgaagtagttgtaaccatgtacactcctcccagtaggatatgagatttcgttttcaatgttcttgatgaattttattagagttagaaagttcccaattttatgggtgcaaaattatatcttgctgttactttaattattatttcttcagttggtatgcttttcatatctttattagtcatttgggtttgctattttctttgtctcctttttcattgggttgattgtcatcttaaagcatgattcttacattttcatattcaaactttgtattttatgtactattttttgcaaatatacccccagtgcatgactaatattttcattttgcttatgcctattgttgtataaatttttcttaaaaatacaattagttgcattgatctttattgtatatgtgtcctatttaagaaatttttttctaacccaatatcataaatatatctctaaatattttgctaaatgtttaaaaatgttgcttttacatttaagtctttatctttgactttttactctttgaattaaagtctagttttattaattttcctattcttagtcaatatttagcactgtttattaaacagtccatccacccctatttgtcatatgtcacatttgcatatatgtaagttgagctgtttgcaggctatctactctataggtcaatttctatatgtataccactttgatttagttaccatagcttattaataaatattgatatctatcagggcaatgctttattacccctttttaaaaattcttcacaatcctcttggcttattatttattggccctcttttcctcaatcaaaacttgagtatcatcacctaaagagctttttagtattcgccttaaaatctgaacagaataacattaaacatttcatttttaagttgtttatttaaaacttttgtatactgagtccatataaatctgttttctcattaaagcaggattctaatacaattttatattttaaatagcaatgaaatgtgcatgtagaatcagtcagctaatataggcaggaaaatgacccaacattttagtcatcgttgagtcttcttttagaagtgactactagagtgacatatgagagtaagctactgaatgttgatattcccctagcttggcttgttcattgggcaattgagattctaatagctttcaggcaatacctccctgaatatctgcctacttatgctgcagagctgacagatgtcttctgtgtgtccttgagagagtgaggccattagatgtgaagcctaaaggatccttgccactttctgtgctgcagaatggcctctctttgtttttttttttttttttttttttttttttttttttttgagacagagtgttgctgtgcccggattcaagcaattctcctgcctcagcctcccaagtagctgggactacaggcatgtgccaccatacccagctaatttttgtatttttagtagagacagggtttcaccatgttggccaggatggtctcaatctcttgacctcgtgatccacctgcctcggcatcccaaagtgtcagaattacaggtgtgagccactgagcccagccctttctttgtttttgactctcttctttcatctctgacttgcacacctcagttttcactgctcactgccctagcaccatttctagttgctgcaattgctgatctctagttttcttgtttctttggcctcctgccacttctgtctcacttctcagccttgtatggaagggatgacttttcacagacaactcctgccaattgggtttaatctttggagcttcagatcctcttggcaatatgtctctcttcctcaccacacagggaggctgctttttttgctccttaaattgattgcattttaaccttgactatgtttagttcagcagtcattagagacgcttgatgttctggaaagctggtccctagatgactaaacttttactttgagtgtgaattttaatagcattttctcaaagtcttgtggaacatctcagtggctgaattatttttcagtgctctaacaaccaaggataagacgcagagtacactttcaaatgttttatttagatgaatcatttcacagaagtgaggtgcatgcatttcctctgtattagttttctagggcttccataacaaagtatcacaaaccacatggcttaaaacaacagaaatttactttttaacagctctggaggctagaagtccaaaatcaagatgttggcaaggccacacttcctttgaaacatgtagggaataatccctccttgcttcttcctagctcctggtggtttgctgttcatctttggtgtgccttgacttatagcttcagtcctttcatctctgactctgttgtcatatgtgatctccccttgtattctgtatctggtctcttctttttttctttttctttctttatgtactgttagaatctcactctgtcactcaggctggagagcagtggcatgatcatggcttactgcagcctcaaccttctgggctctaatgatcctcccgcctcagcctcctgtcttctcttcttgtaaggacaccagtcatattggatcagggaacacctaattcaacatgacctcatcataactcaattatatctacaaagacccctgtttccaagtaaggacgaattcgtaagtattggaagttaggattttgacatatattttagggagatacaattaaacccatttgaatctgtgtgagtcagggttatctagagggacagaactaatggaatatatatgtatgtgcaggagtttattaagtattaactcatgtgatcacaaggtcccacaataggccatctgcaggcagaggaccaaggagagtcagtctgagttccaaaactgaagaacttgaaatctaatgtttgagggcaggaagcgtctagcacgagagaaagatgaaggctgggaggctaggccagtgtcttctttccacatttttctgcctgtttatgttctagctgtgctggcagctgattagattgtgaggacctagattaaggatgagtctgcctttcccagtcctaactcaaatgttaatctcctttggcatcaccctcacagacacacctaggatcaatactttgtatccttcaatccaatcaagtcaacactcagtattaaccatcacagaacccaacccattgaataataccatgtgccaatgatctctcaaatgagcatggcagaggtgtatattgaagatgcaatcgttgattttttttttcaggtacatatgtggagaggtgtcagcgaaaacttttttttctcttctcctataccaattgttatctttttactccctagctcctcaaaacatactctcaatttgtaatttattgttagaaagtagaaagtgtgtttttttttaaaaaaaatcaacagttggaaatgtttttcaacatttagcctatgggaaaataatacttttagcctatgggaaaataacacaactccaaaagatctataatttcattgttcaggcttttgtaatttccaaacatggcttattttatttttagaaaattacccagtttaaacaaaagagactaatattatgcaaggtgattttctacaatatttctgattaagactgattatgaatatttattataataatcctgggccaagtcctctacactgattggtctttctttgctgtccagaacagtgataaaaatgagattgattccatttaatagaattatactatactcagtaaatggattactacttttaaaagattggaaaataataaagtgaaccaaatattaaaattatactcattgagctcagtttagtctttcattgaggatttaatgaaagttgagggtttaatgaaaggatttaaagtgtattatttggaataactagaattgtataggctagctttctacacctcaaagaagaacaaaagcagtttagatcagaggaaagtatgctggccatggaaggaagaatgtaggagggtggagggtaaagaaagaagatgacaggtttagaagaagaaaggaatgttgtgttttcgaaaaatacagaaggggtttccatgctagaatggaatatatgccaaaacaataggaggctatatctgaataaaagagtgataattggtagagttatttcagactaattattagaggttttgatctaacataagaacatactctgattagacattattataggtattgattctcatgatttgactaatttgacagctttaactcctgaacataagatgaatagaaagtaggagatgaaacaagaaactggggaacttacactaagcactcttgtaagatcttgggtgttatattaaaagtgttgattatgatagtggctttggaaaggtagaggactgtgtagttattgaaaatactgatgagattgaattagtagtactttacatgaattccgtgtagatgaaaacagtgccacatgatattatgtataagataaatgatagagactccaagccataaaaacactattagtcatctttattagaaaatactactacaactgttactactacttcagttgtgctgccaccaccattagtattactacttaataccacttattactgggcgcttactatgtgccagctataaactgggcaaagtttttttatacatattaatttattaatcttttaagcgcaccctattctgaattgcagtcctctgtacaaaaagtaaattgtaatactttctttaatcatggcgtttggcagtaagtggtctcatttctctggaactgtctattttactctaattttaaataatattttagcaaggtataaaattaaagtttgccaattatttttattcattatgttgaatatattgtgctactgtctcctggcttccattttccatttcagaaggatgctaacagtataattttttattgtgttgtgtctgtcttttcttcctagacaaactaataccttgtctttggcctttgaattctccagttttactatgcagctatcaaatatggacttctttttacttatcttgttcagtatgtattgggcttcctgaataagagaatttattttatatttcaaatgtggaaaattaccagccattatctcataaaaagggctctttttcattgtacttattcttttctttgcaattctgattagacttatgctagaaaattcctctttacccttaacatacgtattttttcttatttcctatttcttcaactatttgtgctttttaaaattcttttggttaatttcttcagctatcttctagttttttttcttagctgggtctaacctgttatttatttcttcctttgagattttatttctattatttctaaagaaaatctatttgattcagagtatcatgtccttagttcatattttcaagtcctattctagttctgtaaatatttttaaatattcatttaatattttctatcctatacttatattatctgaagttcttggattgttaattctgccactaagcacatctgtagtgctttcttgaactgtatactaatttttttatgaagacttatttgtgagagtcctgtgcttcctttggaaaagggttcgttttcctttggctaaggccactaaaacattcttatctgagactgtttttaaataatttatctgctccatatttcccattctgtacagaaagtataaaattattctctacagacacatgaagacaatactgtgtgataataagttatcattatcaattatgaatgaaaccatgcaatttttcctgtgacatttcttttctggactgagacaacaagtttctttaccatttgtctttgccacagggcatttttttcctagttaatatttttaccgacatagcactttaagaatataaattttatcttaggtggacaactgtacagttctattttctgtgaaggtcaagacattctcctattccttgtgtggccacgacaactgtagcttataagttattaactctaaagttaccagtacttcagaatcagcttgcattatttcaatcatgctaatttctttttctttcttgtatttgtttatttattttgactcagaggttttccttccaggtataaagatgtttgctgaactttacatgcatttccaggtgtttggagactttttaaatgctattcaatctctcacattctctcatcttacctttaaaatgagcctattataagagatattattttattcattttaatgatggcatttttttaaaggctccacttcttggctgggtacagtagctcacaagcaatcccagtccccggggaggccaaggtgggaggagcacttgcggccaggagtctgagatcagcccaggcaggacagcgagactacctctcttttttttttttttttgagacagagtctcgctctttcgcccaggccggactgcagtggcgtggcgcgatctcggctcactgcaagcttcgcctcccgggttcacgccattctcctgcctcagcctcccgagtagctgggactacaggcgcccgccacggcacccggctaattttttgtatttttagtagagacggggtttcaccgtgttagccaacatggtcttgatctcctgacctcgtgatccgcccgcctcggccttccaaagtgctgggattacaggcgtgagccaccgcgccctgccgagactccctctcttatgtatgtatctatgcatgtaagcatgtttggagacagggtcttgctctgttgctcaggctggagtgcaggtgcgatatcaactcactgcaacatctgtttagaaaggctaagaaacatgcagagtcaaacaagaaaacagtatcagaactgggacttaaactcaagaaatctgagtcctacttttttattggtacattctcagagacaaaatacaattatttgaagagcttgtcctgctaataacttttgtttacttaatattttcctagaggaatattaaatactattagcattattaatttttttcctaattttcctatggaatggcaaataagcctaagattcagaggagtcccaagttctaactgaaaaggactagtaaatgatatctaatttttaagaaggtgggaatttaaaatgattaatgaaaatctgtcatgggatgaaatattagtccttttttgttgctccttttggtctaaattagtgggcacacgtgcaaaataggtgcgaagcagactaatctttatagatgatgaataatttctcattctactataaggtgtgctttctttaggaaagcaatgtgtgatctttatatgcgcaatcaacgatcctttaaatatgtcttcagtcttaatgaagaaacattaactgggacataacaatggaattcattaccctctgcagagcaaaggaaaagccagatgtttgtgcttgctcttgtaccattggctaccttcaggctaaggaaggctgtaaagttgtctctagttacagaacaaaaaggatttgggactgattacaacatgatatccataatatcattagttgaacatttataaatcaggacaagcataaatacttatatgtctgaattcactgtgagagaaaatggtctttttcttttgcatctcctactttatatatcccttcataattttgtttcaatagtgtttcagttctttcaaattatggttcatgaaaacatcattttagtatcaggattttatttagattagttttcaaaaataaagccacaaagtaattataaacatatacatttggcattggtgttttaactatgtcttggtatatttttactatttttgttggcatataaccatgtgtgttattttagaaatggttaaaagcccaaattctgtagctagcctttctagattaaaatcctcattccattacctaatgttttttagcctctggcaaaactagcctttctgtgcctcagtctcttcatgtacgaaatgggaacagtaccccatggagttttaaatgagtattaaatgagtagatataaggcttagaacagtatctggaacaagggaagcaccatgttagggtaagctattattattgctattactagcatcatccgcttctaagtcatcattgttatcatcatcatcatcattgtcatctccactcccttgtgttataagtttttctaacagtacacccttggcttagagcttctctttgcatcaaggttactaagatcaccgactttcagacttacatctcaggactgaagctgactatctcatgtgaccttaaacaaattaatgaacaatttaaatttagccgtagttttgggtgtgtgtttttttttttaaatctttgaaatggagctagtgtcatccacctcactgtgagattttatatttataaagtgcttagtattttgcctggtatctactaagtacattataaaagacagctgttattgtattttacatcatagaattcaaaagcatcattgaaattgttacttatttattcttagtgtctcgagcagagggagatgtgccaaaagtaactggaagagaagaggtgacattgtttaatctcaaagagatccacacagagtatggcaaaatagatttgtacaatgctgccatttttagatataatctctaactacatctgttgattattgaaattattaggtttgaggaatctcaattgtaatttaaatgtgtaacaatggggcaaaagaagccttaaggctaaattctgtgaatggtttcattcactggttttgccagctattggtgccaaagcattaactggagtatttaagaagtgtgcactttggtggaaagttgatgtgatgtgtgtatgctcatgcatttacacctgaaaggattctttaacttggaattgtgtgtggataacaaatagatctattaaaaattactgaaaccacactccttctcaggaattaaagttgactactcattgtttctacaggacatccggtaatggatgcatgctggattcatacctggccttcttttctatgttaatatagcagccttggattagcatgacagagtggtggcctccgtgagggcatgaactggatcagcctgggctgccattgtccccgtccagtatgtcacgatgcctacttcttccttcacggccctaaatactgcctggaagtggcttagaattttgcttgttaaacctaggtttctgctcagtaatgcttaagctttctgtctctaaaatacaagctctctgcatctacagcttatctggcatctgtattttcttacccagccatacctttaaactccttttggtgaataaagccacttgctgttcagagtaggagttgaaaacgaactttcccttcattgttcaaaaccagttctcgtacttaccacgatgaaacaccctccagcagtgccccaacacaattgctaaattactccaactccaactccataatgtgtaaatgacaaagaattaaacaaccatgagtgtttgcttaaaaaaaaatccatgttagcttattaatccttattgtaatgtcatacagagtagaatgcgaacatcagcaggctaggttattctctctataggcagacctatgtgggaagttaaattgtactcccaatgtgagtttttaaatttgtagtgaaaaatatatttgcctagggactgtgtacctacgttcactggcaggtacaaacagtgcaattttcaagtcatttataatgattttctcattttcctttaaaggaaataaacactaagaagcacagaatggggctcccttttcttggaagcagcctgcaagaggcaggaagaccctgagactgccaagataatctcagaatgagtcaagattgaattgttaatacaccaaagaatatccaaaaagtctgaaaatacaggaaaaattgattctacttattttcagtttaacaataggatccctgctttatattttgatgtacttcataagaatagtgtctggagattgaaggaaaaaatatggagcatattatttgaaaatttaactagctttgaaataaataattttgtccaatatttcctgacgttttggatactctacattattttgtctgagttagtgggtcacatttccagtagtaggagacaaaagggtaaaattcactgacttcctgtgatcttcattctttcgtttattactgtacatctccctccaacttcatgcaactggtgtggtaagttggggcctcttggcctcagaaatcctgttagaagtaaaatggggcccaacagagagggacctttggccctaaagcccgcttttcatttaggtcttaatgttaggaggttagagatgccttgaacttgaactattgatgcaggcttgctcaatatgaggccgaaggactgcttgatgatcagcagtgtattttcctgggacattttcatctatactctgtcttttagaaactcatctatactctttgtcttttagaaacttagccaggagtgtgggctggggagtgggctgtgtgtgactgatctctgccatctctcaaagtcatgattaaaagctgccatgggagggataaagaatgaaaacaaactacacacacacacacacacacacatatatttgtgtgtatctgtatatacattgtgtatatatatttgtgtgcatttgtgtgtgtgtgtgtatatatatatgtgtatatatatatatatgcacccttaccttttatgataactgactaagtaccccctacatactcatgattcccaactccctaaacacagctgcttttttttttttttttttttgaatttctaaatgtccacttagggggcatttctctatagttgttctgcaggtgattcttgttagtgggtctttcagaaccatcaagctggaagtaagtagggcagaaattgtgacttcatgttgaatatctaggacctagaaagtgtctgctacatggcaagtgcttaataaatgcttattgaataaataaaaggatgaatgaaatgatatataattatatactttgtacacaagcacacatatagctatgttcatatcatcaatggtgcgcactaagagagtaaggacaagatgtcactgctatccaaatctcccaaatttccctcacccttaaggctgcatgtcaggctgtcggaacatttttttccctttcaaggttgatgtttgttttaactttattttacttattttaaaaatgtatttttgagttggaaggagagaagcccatctgagattcatcatgaccctagtgacaagctattgatcacaggagtgaagaaagctttgatagcacattttggcagtttgtcatattggatttagggtttttagttaccttaaatcaatttcgttcattacccattgtcagatcttcttgctgcacaaatatatttttattagctgtgttttattatggtttatacactgatattcatttaaatgttatgtcttctttaaatcctcttaatataggaaatagaatggtggtgacgtggggacctcccacagtttagtaaagaggccttgtggctataatcgcatttaagaaacgaccatttctctgtgaagaatggaaaatcagtggtaggtcagaaattaaaggctatgccatttaaatcctaaaacctgatcattctagtcttttcacccacaagccagtgaggaaaatcagttttccccacgttgcattttaaaatataacttaattgagctgtaattttatagcatcatttaccatgttcatgataccaattacttggaacattttttctagttttgaaatatgtggtagaattttctatctttaatcaacttttctcattctgagaattgttcctgtgctttgtttagccaaagactcctttagaaaaagctagattgacttcttattttactgtgtagcaatttcaagcctggtttatttagctgtagtctataagatgcaaattataaaatgtgccttttttatacttctcatttgcttttctctccgattgtattttagttgatatgaaatcagtgatgcgagtattattcaagtattattcagttttactaatgaaaatttggagatgccgtaatgacttacaaatacatacacataagtggagtatcaagacatccaaactgatatacaaaggcttcaactatatggactaacttggggacagtaagttgtgaatttgtgaaactgtatcagaaacagaatatttcctccaaagtatatggaactgcagcaaatacaaatatcagagttgagagacccagcttctggtctggactgtgcccttagttgattatttgagcttgagaaagccattaaagattttgatagttattttctgaaattcagacattgagttccaccaatgagctcacagttaatgtctttcaaatatatgtagtaatttagatactgaaatagctcagagtaacttgtgactgttttaattgtttttataacaagctagaaaccagatctatttcttccaaagcagattagaaatatctttttatatgtacatgttaattggcttaaaaagtagtgtgggaacaaacaaatcatcttgacttgaatgattagtagatatttaatatttggaaacctggagagagttgtttgctcattttttaatgtcagttgttctttttataatgcaacctcagcattagttctcaggcaatggctaatgagcattcatcttgacatttcccttcttaaaggacatttaaacaaacttcccaagatctaccctatagaagagaagattatatttttatgtgtggttcagaagagcgtatcaaagaccaaatagaagaaaaaaatgttaacaattgaagctatcacaggcagggtgtggtggctcacgcctgtaatcccagcactttgggaggctgaggcgagtggatcacaaggtcaggagttcgagaccagcttgatctatgtggtgaaaccctgtctctactaaaagtacaaaaattagctgggtgtggtggcatgtgcctataatcccagctactcagggggctgaggcaggagaattgcttgaacctgggaggtgaaggttgtaatgagctgagatcatgccactgcactccagcctgggtgacagagtgagactctgtctcaaaaaaaaaaaaaaaaaaaaaaaaaaaaaagctagaacaaattggagtggtttcctagaaagacaaagcgttttttgtcctagaggtcacacctggattttgcatctgttaaaatttcatctgcatgatgccctccaaggtattgttaaagtctggaatttggacattaaatccatcctctgtactctgcatttccttgtacagtatcttaaggagcatgaggaaatcaagatgtcctttacatatccatgtcaagatgttgattctgaatgctgccgtctctttgattcagaattagatgctagcatgtttgatgctcgcgttatctctgcttgtccaatctagatggaagttgtggcattgattcttgttttcctaataacattagaaggtttttgaagtcacacttcaactaccaagtactgtagcagggtactgacatttcagtgcgttttgatttgtgtcatggttgtaggagaatacaggtactgatcaatagaaacatttattgacttaagaatataaataagtcagcagcatgatttttatagagagacttgacttacttattgaaatttggggtttatagaaaaattaatttattggctgcttatatgctttacaagataacttacaataggttttctttagtatatatacgatatagtgtccttatttcagaaatatatgtgttgcacaatgaaatttacattccatcagtgtatcttccctttatgtgtaaaaatattgaacaaaattgagttcactattggtcctctatatgccatttttctcttaagcttagatcatcactgtttaacgtttcctaatttatggtcttctcttgcattcaaggccaaaacaataatcacctttttatggaatgtggctattgctacatttaacaggtctttgcaaggttctcatttgtgaagtatgccatattgcggcttcataatctttctggctacaacaatgtaaaattaccctacaccctcttctcccaacccaggaaaaggctacagctgaaataattaaaatccatacggttaatgatctgtgccttctgcaaggtggcgcattactgtctctaacgatgtttaatagctcataacattcaatacacttaatcattagttactgacatttctagtacttttgcatactgaacatatcttgatagggcaaatattacattggaaaagacttaattatgtaccttgggaaagaacactgaccaaatgaggacacatttggagctgctcttgccactgaattagggttgtcacagaaccatgtggctatagtgggattttgttaggtgaggagagtttgatttgctggtgtcacattgggatttattggcctcacagcaacaatggcactgagaccagagtccctgactgggatgtcaggagacagggatgctgacccccaccaaccacctgaccacggcacttgggcttctgtgtcttcatgtgtgagatgagaaaggggtgctgaatgatgcctgaggagttttcatccggatctgaaattcaccagtctcaacatcacttcagaggcagtggccccatcagactgctgtcattttgcacctaatttattgttttctgagagtttctggaaaaacctaaagaatgataaagagaccatggagcccactacccttggtagaaagacaaagggacaggcagccttcttattttataatatttacatagttttggtatggcttgcatgatagggttttttttttttttaataagcagataaggctttcttctgaatactgcttatttaagccaaatattatcttgttttttgataacaagacctgaatagtaccaagcactgctgtaactgcttggtgcttaaagtgtccacaggaggtagcttattttaatgcagattctgcttgagaaaagacaggacttcagcatccctgagccttagagaaaaattctgattgttgattgttgaccttttccccaatcacagatttcagtcatagccaccctggggtgaaatgcatgtatagctctctcatattcttgatagtttccaaaaaagtgttaagactttttccttcttgctagcaaaggcctatgtgggcaaaacagaggagaagcaaaggagttgctcctttcactagaactttcctttagcaaatgttttggtttccttgctacttcctgaacttagaaatccaactaaaagttcaaacatgaaaaagaagaaagtatttcaattattttattgtagagtgtatagcatctgggatttcatttgtcttttctccctgcttcagtatcaattcaatatggttcaaaatgtaaagtgccaggcaggcgttcctttcctcctctcgacagcattccttgagggaatataccttgtcaaccgatgtaaggtatgattaaataaattaatgtgctacaattatgatttcttcactgattaagcttacaggtcaaggaaggagggaaaactcaaatgcatgcatgcacagggagtcacaaatcatccctaacatgtgacaataaggagtggtggaggctgggaataattggagaagtgtctttgtttaggtccttgttccttcccttcctccctcctaccctcccttcctccatccttccctctctcccttcctttcttccttcatccctccctcgctccctctgtatctctctccctctgtttctctctccctccctttctccttccctccttttctccttcctccctccctcccccctcccttcctttcttccttcatccctccctccctccctctctcccttcctttcttccttcatccctgcctccctccctctgtttgtttctccctccctccctttctccttctctccctccctctctccctccctcccttccttcctttctttctcccttgcttgcttccttccttcctataccctgtaaactgaataacataatttactagtcttcaactcctaatacaggtgcagacagacatatgtaaacaaataattttcacagagtaaacaggatgttaaaataaagatatttctaaagcactggttttaagaggatagaccgcagagccagacagattttgaatgcctacttcaccacttaccatctgtttgaccttgggcaaataaccttaataatctttcttttctgtgttcagtttcctcagatagaaagggtgacaatgagaacacttccttcatcagattctcttcagtagtaaaagagttgatacaggttaagctctttgagcagaacttggcacattgtgagctcttaaaaagagagctattattattatagatgaaagagttacatgctaaaatattaagtccagatagatacagcctaatgagatcctaaagtggaaggaatcttggaccaccctgctacaccacccccttgctgctggaaccatcccagaagaagacattcctatgtttgcaaatgtagttagagcagaggccctcagccacatcaacacctgcttacctcatcttttcaacacattatccaactctgcctgattcttatcaaagaaccactcacttatttcttccaagaaaaggagccaagaggcatgatgtaatgcatcaagatcttctgtggtgaccttgtaacttctgtggtgttgtccaccttggccattcatttaacatttaagtttgttttgtctcaaatgaagatattttcccaccttgctttgaaaatgagctgaccagacctgtaagtggttttcaagtattacattgccttacagactctacaaaataatcaaaatgataaaatgttctgaagttggacattgttgactgaattaccgttttaagattctgttatgtattttccttcacagtctctgtaagtgtgtgagctcaatcgggatgcacagtttgagttgcagaactggctaaggctttgggaacctgtggtcagtttccctcactaatgttgctttcctctctaaaaacatgttttagtttctgcattgctctacaagatccgtttttcagaatcctttaagatctgtacttcatggaaaatacatgtgaaaaaggttgttaggcaggtgtcggttatcatgaaaagggaacaaactggttaagaggattggaaatttttgccctttttctcatccttttttttctttttctttttcatttttttcttttccttttttttttttttttttttttgagacagaatctcactctgtcgcctagactgcagtgcaatggtatgatctctgcttactgcaacctacgcctcccagactcaagcgatactcctgtctcagcctcctgagtagctgggattacaggtgcccaccaccacaactggctaatttttgtttagtagagatggggtttcaccctgttggccagactggtgtcaaactcctgacctcaaatgatctgcccgcctcagcctctcgaagtgctgggattacaggtgtgagccacaacacccggccttctctcatcttttctaagaattctgtaatacagggagaaatataaaaaacatgaactatcagtatatgttggataatttatgtaattagataaaggataattacgcatttagacaaaagatgatatgcagttgtagctattatgtgtgaaaactgctggttaaaaacatatgcatacagaactgtctagaagctagctcatcggatgttgtccttggttattaagatgtgaatgctcttttggcttcttttaattgtatttttttagttctcttaaggagcacatatttattttatagcaaaaatgttgacaatgtaaattaccatggaaggtataggaaatacattgcaattcctttccctacgtggcttttcatgtcttaatctgctcttattctggctgtttcattacatttgctctgtggtttgcctttttcttcattttcattctcacactagttccagttttcatcatttgattccagggagtaagtccaatacttgccattgctgaaagagtgaaaagaaaagtttttttgtttgttttgttttgagacggagcttcacttttttgagacgaagtctcactccgtcaccaggctggagtacagtggcacaatctctgctcactgcaacctccgccttccgggttcaagtgattctcctgcctcagcctcccaagtagctgggactacaggtgcacaccaccacgcctagctaatttttgtatttttagtagagacaggatttcaccatattggccagaatggtctcgatctcttgaccttgtgatccaaccgcctcagcctcccaaagtgttgggattacaggcgtgagccaccgcgcacagccgcagtttaaccctcgtttcccgggctggatgcaatggtgaaatctcggctcactgcaacctctgcttcctgggttcaagcaattctcctgcctcagcctccctagtagctgggactacaggcacctgccagcacgcctggctaattttttgtatttttagtagagacacagtttcaccatgttggccaggctagtcttgaactcctgacctcaagtgatccacccacctcagcctcccaaagtgctgggattacaggtgtgagccactgcaccttgttttgtttttttgagacaggtctcactcagtcatacaagctggagtggtgcaatgatagttcactgcagcctcaaactcctgggcttaagccatcctcctgcctcagcctctagagtagcagggactaccctggcaatttgatttttaaattttttttgtagagatagggtctcactaggttgaccaggctggatgaaaaagacgagttaaatcctcttcagcctctaagatcatcaacaattctgaggttttcattttcttcacccagcactctttgaatcttgcttttcaccacacatttttccttgcttctcacagtttttcagcagttcagttgtcaagcatttagagtgctgaccttacacgcaggcccctccttcaaggaaagagccacaggatatttgtgccattttggttcatgacctgattcctacctgatgtttttgttcctaaaactctgccttccacatgccatacttttcttttttccttttattatttttctttttttttttttttgagatggaatttcactcttgttgcccatgttggagggcaatggcgtgatcttggctcaccgcaacattcacctcccgggttcaagtgattctcctgcctcagcctcctgagtagctgggattacaggcatgtgccaccatgcctggctaattttgcatttttagaagagatgggatttctccatgttggtcaggctggtcttgaactcccgacctcaggtgatccacccgcctttgccttccaaagtgctgggattacaggtgtgagccaccgcgcccagcccatgccatccttttcttgtgtttattattactggcatgcatcattccacatttgaattgatcttacctcaagctgatgcacaattatgtattcatcccagtgctttcagggtagcctaggaaccagaataagcactgatttaaaagcagagcaccattttttttttatatatattctatcttcaaacaataagtacttttattgagcatatgttgtcttgcttctaaggaagaaacacaagaagtgaaaccaaccaaaatatacacttttaaacctgtaaccaggagatcaccaactcttcttactgcattttggatgcttgaagtggttgtgatagtagtggtattaatgaataatgatcacccgttatgggtaaggccccatgttgggtgctttgaatgcatcgtctctaattttaactctcatggcagtctgtgaggcagctgtcattattttccctgtcattttacagttgactggactgaaatacaaaggttgaataagcactagctcacatatttggtaatagttggggtggagtcgagatctgaacccaggtcaatgtgactttgtttatcctttttcatccatgagttaatacatgtaaagcttttagaacaatacttatataataagcctttatatagaagcactacatacatgttaaaattgttattttccgttggtcccttatttggtaatgttaatttttcttcttttcagcaggttgtagtggctagaggacatcaaaggctttaccgtggaaatgttgctctgagttaggtctataatcaagtacatgagattgaacaagaatgtatataaaagaagcaggcagatctcttgtaccctctcttcactgccccatttccctcttacacatgcatactatttcttagcgaaatatttcaatcttatagaaaaagcacttttctctacattcctgggaaagtagctaattttatcctgataaacttgcttatcagtttgcttcagtaatcttaaagctgcagggactaagacctattaaaattatagctgatttgaggttgcctttcctttggaatccttatcaacatgaaatcacttgtatctgcttaaaatgagcttttagtttaatttgctttgaatgaaatcatcttctatttatcttagaataatctcagaatttagtgtgagttttccatccagaaaggcagatggcattttctaatgtgggtctctctctctctctgtctttctctttctttctctctctctctgtctgtctcttccctgtctccctctcacggacatctgctgagccactcttggggtgcctgccgtgggccccaggttgattagctccacctaagatctctgcactgacacgtgtcacccatcggctttgaagcagtagtgctgaccagatggttggcatctgcatgaaatgccagtacacttctgccagatgcccgatggtgccgctaagacagatggaaggagtcgttctaggccctccagagcccctcgttctggcaagacctgtcttctggaatgatgttggttcattccgaatgttcaatctcaacttgaaaatatattggattaggcatggttcttcaagtagtgcacaagctccacctgcagggaaggggtgtgactgccctctcctcctggggatctctgttctgccaatagccctacctgagtgacctacttttaaccatgctagggctcataccgatttcacctgcaggaactgggatcaaccatgtagctacctgggttcgtgtgcagaataaatccccctttcccttgaataagtggatctatttcaacagtagctgacttacctattaatatcttacacaaatttgtctagctctacttgtggcacttttgtcaatagtttgttggatttaccttggtgtataatgttctttctacttgcactgtataaagtagggaaaaggtggctttctttctcccaccacacagatatttgccaatgactttttttatttgtgaggaggagaggcaagaggaggagatgtatgtaaccctgtggcaagggtaggacacttggattgagctctaggaccatacatcttgaaaattcatcattgtgccactagagtagtgaatttttaagtttctcccatgctgttgttatatatcaagctatttgtgtgtgcctaggcaaaaaggctaagctggttagcaatataaaatgcttattgtagatggtagcctcttttaaaaatccaacagtgcaatatatttccttacacacccacattcccgagtataaaaagtatcactgtgagggtttaaataactaccacactagctgagagaattactttatattctgatcggcctataaaatggtaagaggtgttttttattttttcttatgactaggactaattacaggatgcacagactttccatgctatcattggcttcatttaaatgagctagattttgcttagtaggtgagtagtaatcattactacaaaaattgaataaattgtttgatcttgagttaaaaaatctgtcatattaactgtactcttcaagtttattgaagcttttatacccctgtgtacactctgctatatgaagctccatttatggtttctcacagttttcactccccaaagtggatatccacccactgatttggttatcagtctcaatccttgttaattatctctttgtttcccattcctgggtcccttgatgcaaatatatacctgactcttgtatcgtgtcagccctcatcgtcagcttgaaccttttgtctggtcttcacatctagtcagcccttagatcggttggttgtgtcacacagatgcattttatactccctctcccatctccttggtccaggctctcaccactgctctctcagactaaaactgcatttaccctattaactgacttctctgtcctggtctttttcccctccagtttattttatgtaatatgactaaaataatcttccaaaaataaaaatctattattgtaacttcccaccctgctgagggtaaaatccaaacctcttacatggtgttctaggcattactgcctctctccagcccccttcctcatgggttcttccagagaactgcaggtctctgtactcagcatggggctccaggcttcagagcccacgaagtgttcatgctgcctgagatcccctccccacctttgttttcctggtgaacacctctttcttttttgcatcccattaaaatggacagcttccccccagtctcacaataaatgagcaaatacctctcccctctgtgttgcctactttcttaatcttgtctcttatggcacttaattactgtattctgattatgtgttgacatacctgtttactcatgagactttgaactccttgtgcctgggtattcttagtcaactttgtaatggcagagcctagtacagaatctgacacaagtgtgtgtttagtaaacatttgtttaattggtttagttctcttctaaatgttttctatattggcaaattggttactaagaggattagaagattggatcttgggtgcctctatgatgtgttcttgtctgattagctcaattaggagtacagtgttaatgaggccaaggtcttaactttcaattccatgtggaacaatttgtacctcgactgtcagtaacttcaatgagttgcatggtaagttgcctggtatcattggttccaaggcaaatgcagagagaggatgattaagctcaaggcaaatccatctcaactattagacaaatggaattaaatatactccttattgatgtgaaaagcatgacttcatacttcagtgtgaaatgagcaccttgtttggtccacagcacttgtccatgtgcactgatgtacttgacttaaagggctctttgctgcaatagaggtggcagaaataccacctggtcatcagagttttgcaataaaaacagtaattgtccattcacagatctttaggatggccagtctctaagcctcttgtctacccacctgcctctccgtgtctgtcttccaggtgagacgatgcggatcgcctcctccgagtttgcagatgacccttgctcgtcggtaaagcgcggcaccatggtacgggcggcaagggctttgctctccgcggtgacacgcttactcatcctggcggacatggcagatgtcatgagacttttatcccatctgaaaattgtacgtatgtagaacttatcaaaactttctttatgtgagtggcaatcttgaccgtgtgtattacagctctggcctctactctagatgtttcattgctcaccagatcagttcattacctacccatgtggtgcccacgtccaattttttctaataataaaattatattcaataatatagtcaaagagttttgtaagactcacttgaattattattttttttcctaaaaactgagagtttagatttctccttacttcctggaatgtgtaacagtacattcttttagtctacagagcctggacagggtggacctgcctttgttctatctcaagattcggagcaatcttggtccatgtgatagttcaggttggggtcagctctgctgagcagctgaccacctgtgcccaccttagtgtggattacatgttgaatatattttgctatctactctagccttgctctcctgtagatatatggattttgaatcatatattggcaataaaaaggggccccatccacaattcccgtggctaaagtcaatcttgtttcaccaagcctggcatctaacatacctggattggttctctgggtgggcacatacttgtcccactaacccatagaacaccattctatgtgccttgcttttcatggtttcttttaattcttttgtttcctaatagaggtgaagccctgttctcatcacaaactttaatggaatagtgattaaggctacctccccagtccttgactacgggtcgttcttccatttttctacttgctgattggtatctagttgcaacaaggatggttcaacactttaacaaagatgatgtaacttagctgcttgggaatatggcctctgcttagagaatccctactccataccctcagtgaaatatgattcctgaacaattggcaccaactctggactgatcgcagggtacttagatgatgagatgcaaaccacattttcctttttggagaaccaaccaattgctcgcttggttacccctgctgtcctgggcattcctggattatcatgtttcctatcagccaatcttcctgtcttattttctttatcagtgaaagcaggttatgaggagggaccaggggagataggaaatgaataacaagagcgtgctctcacctcaccattgagctcagatttgttcagtaggaggaatcatcaagaaattacttaaatcataactattctctgtcaaaaaaccttgggcaggatcttttaccgaaggtggccccaataaagtagccaagatttccaaattatgtataaattctggaaaaatatgaaaggcctcaaattccaacacctgcagcctgagctccgaggtcataaacataaaggtagtgtatctgtttagggcttctatacaggtccctgagcagcaggggacaccaagaaactgcttggaagttttttttatttttatttttattttttcctctcctccttaggaatgtttcagggaatgggttctgaaaggccaggaaaggctcttgaaattggataagctgagcaatttgaggagagtctttacctgtttcagaggctggtgaagggcagtacagtactataattaaccatttagctgctggagtcagagtaactgggtttcatcttggtttggtatctacttgccatctgtctggtaacctaccagataaatctcagatatctcatctgttaaagtggggctaatggcagtggagccctcagggtggtggggaggtttgaatggggacgattcctgtggagcacttatcccagagaatggcacaaagtgagtgtcctgtcagtggcagctgaatagggagtgtaagatcactggaaccacttgtaggctgccacactggctgccattcctccagtctgtctctgttatatccatcttttcagttacacaaaacttccttctcaagcatgttggaagaaaggttgtgttatctttcccttacagcctagttagtctccgaaggcgatatttttagataagtctttccacagaaggacaatcttcctttaccccagcaaggaaataatacgactgaacctaacaaaattaaccttacatctcatatgtcattgtttgctgtgttgtggaaggccctgtcagcaactgtcagggagtgatgatgggctgaatatccttgctgaactgcctacactccacactcgagaagtgtgataaatccagggcgatgacgccatgtgtggtaccagttgcctcctgcagtcctgcctctcatcccacctgttttgaccagtgctgttggctcatcagatcacagaagcctgctgtaatggggagtcaattgcaatctcttctccacacagccgagtaagggaagtttttttttttttttttttaacgatttagcacaaaatcatggaaaggtcaacctggcaatattaagtagtcctgtcagactgtcagtagtaaaattaaaaatgattgtagactaaataacacatttgttctacttagagtgcagtgtctgtagcaaacagctgtggtggaatgttgctatcttgtggagcaagtgaggaactacagtttctggtgccatctggtgttttctctcatgaactattgcccctaccccctaaaagacaatacgtcaataattcattgcaaacaaacatagcacatagttctactcagtagtagggagtatatcagttcttttgcgcagaagcatatcttctcaggacggataaagtaacgtattgtctgcaagcttctatttatttgtttttctgtaactcaggatgaagaacatgtcaaatagctttacatattttgatgaagcaagttagaaaatatttacacctttctcaaggatttttttaaataaacaatgagtttctttaccacctggatgataaaacatagatgagaaagaaaagagtgacagttgctttctaagaagagtaaagtagtgactctggttttctagttgggttcagattgagtaataccctgtagtgagactacagcctcctgctgtgttaactgctacatatctcttttacctttaagtgttacacatagtattctactttttatctttcaggccatatgtcaaaattttatttgtgttctttccagatgttaatttttctcatctctgagtaactcagaggaacaaagagagaattacctttttccgcagcaacttatattcatgttttttcatcagcagttcgccaggttgatgaagaatagtcacttgagtaatcacaggcaaatgtcgttcagcctctaaaaatgagtaaaggattaggagccctgctgaggtcgtgtggtttggcagtgtgcaggtctttgcattttgctacttgataattatgtttaggaacttaaatttatatggcaactgagaagttcttctcagataacacataggtatcttagttgctcaagttatgctacttgttctatcatgcaagtatttgtggtactttaatattgagttctctttgagtatatattaaagattcacatgactgcaaaaggtttttgctgctgctgttactttaaattcaggaggatagagatagaacagtgggtgacttagagttctagtgcccagttagcacccaagtgagaatttaatgttcctgagtaaagctaaagtaatcatttacatttcagacaccatttaaaaatactgaattataatcaattttattgttgaagttgctgacaaatgatttcctagccagatacctggaatatcctgcaatcagttcacattgtcagtgtgttaagttgatatgtggcatccggaattttaaaggaatcctgcatgtcaatcagtgatcatgaagagggacatttatattccctaggctctgaactagtgtaatcagattatattgtcaattattagcatgagcgatagcaggacacataaactcatgtagatgtgtatgtcagaggaaacaatcacctttctatcctcaggctagatcctgggataataatgttcttgattatttgataatttctctctagaaaatggaatagcaagatacaaaatagcaacccttagtcagcttctccagaagtcaagtttccttagtggctaccaagggccaaatatagtgctgctgttctaatgtgggggtggggggcattgatgagacatgatgatcttaacattaactgtgactttgtgagttttgcatcaaacagcctcatgcagcctcagtagtgtattatttctcaagtctactttttagtcctgaagttctaatgtggctcttgtgtttgaataacagtagtcaattggtatcataaaatagccttgcctctcattataactgcagaaaatatggcccaggtttttagcatatcttttctgtcatagctatcacagtattaccttcatgcagctgcattgttcatgatttatttatttattcagttatacacttaagaactatttattaggtgctgaccatatgcaaaacactgtgccaagatgtattattttaagggtgaataagactaggctcctgccttcaaaaccttacaggctactggggagacattaggacattagcatagagtgcaatgcatgttaggaaagggtgcatattgctgtagtctcacccagatggaaaatataattatgatgctttctttcataaataacagaaaacctaattctacctagttttttaaaaagggaatattttggctcaccaaattaaaagtccagaggtaatagcttcaggcaaggcttgatcaaggtgcaaaagcatgacaaaaccaggtttttctttctttctcctccttactgaggactctgttctctgtagcccctgataggaggcctcatagtctcaaagtgcttgccaaccgttttgaaggttgcatgatcctagactaaagatagcacaaaagaggaaattctctttcctggtagctcaaacaaacaaacaacaaaaaaaagttctacaatcttattaggcacaattggcctctcagtcatgtgcatatctctgagttaattatttagatggataacagaatatgctaatttcttagttaacatggtcaggactcctgctctttgctcaccccaagctggaaatgggatcagtttaaccatattgtatggctgcacaatttaggacaataagagaaaggatgatgtggttgggagagggaggtctcaagattgggtctcattgaactaaatgaggtttgcctctcctcgaacctatcgctgggcctagattcaataagtcggagtctcaagtccaagctgggggctgaaagttggggataagtggaaagagttggccccatcacagagttgagggatgaatcattctgtccaatgatgacaacacaaccactcagtcatttaaacagggaacatttaaataattcttaacactaatagcagtttggaataacaagggattagctcataagaaatgacaagaactcttaaggaatatgggaatggcagatatgaggagaagctgctacccctggggctggcatagggcactctagggaggaccccaccctaccaggcctgagatccagatgttgttggagggtgtggccttgggtcacttgatgacaaaggagtcactaaggtgccacacaatataatggagcttgctagaaatctgccctttggattgttgaggaaagctgttcatggaggggtgtcttgctggaggcattctgctacagaattgcacagcggggcatactgagggaagctgctggccacctggtgctggagaagcttcctctgctgcaggagcctgttgaaggagcacaccagaaccaggaaccaaaccctttcctctggcagcgtctatgcaacaccctctactgacaaagcttaacatcaggccaactgggaaaggagtaatatttcagcggcccatccatattttcatagtgttagcagaaaaggtgaatttggatttgatagcctatgcaggaaaagagcatgttactgaaggaaaatagggttctattaccataagaagggagatgatagattcaggtcaggcaacagattttaactacagaaagagctttacgaaccaaggaaagaacaaaggcatgagattaagagaggagtcttggagtgtttgaaacaccagtgattctattgttggtgcatagtgggcaaggtggggagaggcaataacaaagttgaacagagagatccaggttatggacagtcttggataacatgataattagtttgcactctatatataggttatggggagccactgagtagtactaataatttgattcagattagtgatttagaaaaataattttggtagcagtgtggagaaggaattagaagaggaacacataaagagactgttgaaattatctaggccaatgaatgaatgaaaagctggctaagacaatggcagtgtttattgtgaaaaagaggtagattttacagatactcaggatatagaggcacagtgaatagaacttggagaccaatcatatggggcaaggctttagaaactcaccctttctgaaaaatcaatgcagcatagctcagaaattgagtatgggctctggagcaaactacctgggctcaaatccaggctcctacacttacttgctgtgagacttctgacaggttatacaactcctctcctccgatttcagtctctaccggataagcatagggaataagaaaaccatcaaattcaaagaactgttttttgggactaaataagatagacgtaagccatttagaacactatcttgtatatcagaagaactcaatgacactggtgtcatttttttttgtacaaactgaaaataactttggaaatatataataaactaaattgttgtgctttgtataacacacttatacacacatttgtataacacacattgatgcgctttaagcatcaatgacactagcatgtaatcattctttgcttctgatgaaatcatttttttcttcccttgttgacaaggaaagacacaatttaatcaagaagaccaacttaactttatggggcagaaatataaagtatgataatgctgagacaccaatggccataccagagtatctgattaaataagtacaatagttagatggcgggtcttacatgcattcattctttcatgcatttggccaactcctatttccaagatagttatttttaaatttcactgtaaaagtagactgtaacaagagatttacatatgatccattaaatagttttgtcagtgtcacttaaaatccagtcaacttaggtaacaatagtaaaccctggaatggggtcagtctgtccaaacagaaatgataatcataacagcaacgatttctagtaatggtatagccagcaattttctacagggaaccagaacacacagtgcaggcagggatgtatcagactcctcaattccacactatcccatccccagatgccgaccttatggtagactctgcataaatatttaatgaataaatgaattatagggctgctttatttatttatttgtttatttattttgagacggagtctcgcactgtcgcccaggctggagtgcagtggcgcgatctcggctcactgcaagctccgcctcccgggttcatgccattctggtgcctcagcctcctgagtagctgggactataggcacccaccaccacgcctggctaattttttgtatttttagtagagactgagtttcactgtgttagccaggatggtctcgaaatcctgacctcgtgatccgcccgcctcggcctcccgaagtgctgggattacaggcgtgagccaccgcggccagcctgcttttttatgttgaagtaagtaagtacagtttcaaccaggaaaattagacactgatttaatgactatctcaaacaatatgacacagttctagactaaataataggagtagacaggcttgctttaggaatggtggtacaggctattttgaacaggcctgcgaaaaggccaagattttaagagttgtaagtgacaagttctgaaaagaatttcttaacccactaaattgggaataaattttagtgtcttctctagaagtgtcagtcttttcagctttatctatgcactggttataaatattaaggacaaaaatacgtggtttagcaaagagttctggctttggtgtttataagcccagcctggtcagcgggagaagaatgcctggctgtaatgtccaagatcatgagggcatttttaatgggaaagggtatgacagctgcctctgagggatccctttatgtcagctcattagaaatcatttcccaatccaggacataagtgtcttccaaacctcccccttatcaaagggctcagccgttgacaccagtgtccttcttagagccatcactaggcagcccactgcctgtattctctctgcagctttctttctagttctgccagagcccctgtcatccacagactttccaagagtaagataaaaacctttatcttcaaaattattaaggcatttttcccccatgcagcaagttggtgtctctatttaatgagcccctaattcttgccatacattttgctaagcaaatgtatgattttgctaatatgtatgatttgatattttgcatttcttatctcctttaattcccacaaaatctgtgcatagtgtgtagacattattatcctcattttattaatgaagacgtgaggattggagaagttaaatagcttgccctggatcacagagcttgccaatgacatcgttggggttcaaatccagaccaatctgacctcatagccctcctcacacagttgtacttaacattcttcatggtggggcccagacaggtgtatcttggttaaagtgtcccagggttttcttctgtatcttctgctctttgttcaactcgcagtcctgaactcctccatgaacagtaaatgtttgagagcaaggtatttgtttgggccataggagtcactttcctttctctagctgcccagaaaggacaaaagatccttgactgttcaaaatccttgactgttcaaaaataaagacttaatttttatattaattttgaattgtcaatattgtctgttcactaaacttattttttcttctttttctacgtcccttcaatattctatctatctgtctatctatcaatcatccatcaatcatctatctaatctatctgtctatctatcctatccatccatccatctccatctctcatctatctactagtagtgtgtgcccataatccagactttagttccatttcctttatttctgtgggaccttggacagattctgccccgtgattctttgtgagaacttttagacttcttagatccttctggattcaaactctgcatgtaacttaagtttacctttacacggaaagaccccattcttggtgtttctttggaaaaatattttattgaattataagaaattaaaactggcatctagattcttcagagaaaaccactgagaaaataagttatgtgtaacaccgtaaaataagtattccaaattggtctgattaacagcctatgagaagcctgttttatatatattagaaaacaaatccagaatttagctccctctgagataattattgtgctcttccctggaaccagtttttatgtcccaagaagagatttacatctcaaataagcagcaggaacaaattagctgccaagaactgtcctttcaaagatgctgttgatagccaagttaagatgattataaatctattagaatgtacaacaccattgattttggtgttttaaagatctgaggtacgagattctctttaaactataacaatgttttaaaagtgcctttccataccataaaatgtaatttgacttgggtgcctaaaaaacctgacacatggcagttcctttttcaactgtacttcctttttcacatgagcactattagagcctagataggaattgggaatgactaacattgaggatttacatcatcgtttcatatttttataattagggaaaaaaagaagacgcatgctttccatagaagatgagaatggaaacttaaatttcccaatccaggacataaacgttatgtggcatctagattaacctccccccaacccctgccaccagtatcattccaaataacttcctttgcttgctacaactctttccttactaaaatgagttagcctatttggtaaattgaatggtattacatatctctgggacaaaaggcttgatgatattcattattactggtttagatacgtattctcttcctttgctcagtgcacttgataaggaagtgaaattagccacctttgtgattgcgtcaagcctcaattaagttcagatctgagttaatataatctatggttattttcagccattgtagttgtcatttgtgtttccgaattgtcaaacaatgcactgtctatataatgccctttaatttgcccaaaattacaagagccgatctgaattctgcccaagtattttttgcatttctcattactctttctttcaaagctgccttctcgctccattcctctctcaggaaatggaactagtcgggggcctctgtcagactcccttcatgtttaagaacagttgattttccaaaaacatgtctgtcttgtgctttattcactcaggactgtgttcttggctatttccattgatgaaattatttctataaagacactatctgactgacagggactgagcggactccttcaccacaatatcttaattttagtttaatggtgtccacagatggtataacttaaaggtttaccaattgtggaaattttcataccatattgaagttaagatcattgtggaggggagaataatatttttcaaaacttaaattatttataaaggaattttgatgaaattcacaattcaggtccaatgctactatggaaaagttcactgagacagtttgcagcgatttggaagcatggcacattggtagggcggtgtgcttgccatcatcctctccacccccattccactccagttgataccaccttcaaatagcaacaaaacttcaaattcacttgctttcaaggaatcaatatttcctctttccattggatggagaggtataaactcagcctaaaattataatccctttagtcccggtgctagagatgttgtcaacattggttgcagattcatgctgtcctaaatttttagcagctcaggaatttctccagtcttttgtttgtaaaccattttctcttctgaaggcttctagaattttttcttaacttcaatattttttctcaaatatattttccttagtgtttctacttaaaggtcgatatctttccaaatcatactttaataaaatataataaacacaggattttatatgcaccaggagttcagcaattgcttttttatatacaaaatatttttaagtcttgaataactatttaatctgactacacatgattgttagaggaactcttctcctattttttcatttacatgttaacacatactagtgttttagagtttttgggtgcaaattccatttctaacatgttgaataatatttaaatactatccactaataaatatgttgtttttcaccactgcaggtggaagaggccctggaagctgtcaaaaatgctacaaatgagcaagaccttgcaaaccgttttaaagagtttgggaaagagatggtgaaacttaactatgtagcagcaagaagacaacaggtgggaaagattttagaaatgctaggggagaaaatgggtgagtttaaataaccctgtagctttttaggcctgaacaatggatcaactgcatctgcttgctatcaaatgccctaagaacctgtgatgacaaaggttgcttcctgcaggggccagttgtgatgccttggtgggctctggaccactctctggcccccacctataagcaggccacagattatttgcttcactggtggacccaccctgctagccctaccacactctgatcttctatccactgtaggaacacagctctgatgtcaaataaaaaatattaaactgtggggtagtgctgtggtcagtctctggatgtcaccctttgccctcactttttgtctcctagtcttgtgaacaccaccacacatatacactcccaggatatgtagtatgtggggtgaaatttttctgaaagagaagaagaaaacatgaacaaaatgagaggaaatgcaggggtgggggaacggagaaagggagagagaacagggggaaaaggggaggggagtggggaaggggaggaagggaaaaaggggtgagaagagtgcaggtgagcgtgagtcactctcatgatgctgtgtgacctgggatctcctcagcctcagtattagtttgttctcatgctgttataaagaactgccctgagactgggtaatttctaaagaaaggagatttaactgactcacagttccacatgggtggggaggcctcaggaaacttacaatcatggtggaaggggaagtaggcgccttcttcacaaggtggcaggagagagtgagcaagagcagggaaaactgccttataaaaccatcagacccccgtgggaactcactcactatcacgagaacagcatggaggaaccacccctatgatccagtcacctcccttcctcgacacatggggattataggtccctccctccacatgtggggtttacaattcaagatgagatttgggtggggacacagagccaaaccatatcagcctcctttttgtctagggatttctcagtttcagctaactctgtttgctcactggatacctttagtattttgttcccatcgagtgggtttttattctttcgccatagaaaaaatatttccaaatgtggaaggatctcctaaaatcctttcacccatccttttgactgcttccagaattttttaaaacattttgggccattcgtagtttctctaactttctctctgaccaacaggaaagttccactcaacaaacatttattgaatgttcattctgtgccaggcttaagtgaggctgggattaggaacttaaccaagagccagtcctcagtgagacaggcacataaatgtgattttagtttatgtggttatttttaagtatgtttttatcagcagaattccttgttgaaagggaatcttgtatggtagcccaatgtgtaatataaacaggaacaaagttactctgaatagtgagagagagatagagagccccaggaggctactggtgcaggccccagagtctagaagcctaggaatctggtgttctgatgtccaaaggcaggaggagaagggcattctgctctggaagggagagagagaatgaattcacccttcctccacctttttgttctgtcgttgcccccagccgactggatggtacccacctacactgagggtgaagcttctccacttaattcactggctcacatgccagtcacctcctaaaacactctcacagtgacacattcaaaataatgcttcatcagccttctagatacccctcaatccagtcaagttgacacctaaaataaccaacacagatgtgccgattttgagatatccacattgaaacatcaaatagaagagaagtgttgcctggagatggaaacatgggccatcagcatgtagctgacattaaaagccacgagaatatatatgatgttcatatgaaaatgcctacattatttatttttacttcattaatactttgtttttaattgattgttagttcagactctttcaagaaaatttagaaaaacagtagaacagaaggaaaggggaaaaacacataataccctaccacccacaaagaatatggtgctgatattttggtatattttctttcagatatttatcttcacatattaatgcatttaaaatcatactatgcatacaaatatgcgtattgtgttctgctttttaatttatcttataaatattattcatgttattaatttttggaaaactaattttaattatcacatactccaatatgaatgtttcagtagttttttttcaaccaattcttggtaattcaatatttagattgtttccagttttcttcttatgattaaaacatgtttcttcaagtgttttatggagagattttcacaacccgcatttctcacttctgtatttagatctattttaccattttattattttttttagtatagatacccaggaatggaatttctggaccagatgttctgacattaataaaggttttcatgactgtttgggagaaacctacctctcgtgcccaaatcattgcccagtagagaatacattcaaatatttgttacctgtttatccattttcatctctggggctcaaattagataatcccaatttagaaattgtgttacctagcatccatcttttaatgcttaagcaaagggggaaaaagatggttcagtaaattgttcattatttattaccaattttcgtgacaatcttagatatcaaatataatgtgtttgtctcagaattgttttgaccaacaaaacagaagatgtgatttcttgttaccaggtcattcatctatcatgtgccaaatgagcaaataggaagagaagcccagtggttcaaatacgctttactgatgttttccagctggaagaatattctcccagagataacacagctggcaatcctgcatggctctcaaagagcaacactgctttaacatttctgaaaatcatttgaacattttcttaacaacagcctttaaagatggaaataaagagactccctagtggtattattttgtcatccaaaactaggaaaacaaatcatctttggcctgttattttctgttctctaaacttaatgatgagctgccattagaggctgtcaacaacaacaaagcaggaaccctattctgaaaatgataattaagggacactgatgtgttgagcaaaaatcagaagtttggtttcccatttgtaacagtaattgaatatggaggcaagtagggcctcagaagactgacgttttcaggttttctgtctgttcataactaactgtatggcccatgcaatcaatttaccttcttggtggcttggtttttatattatctcagcaatattttattgaatgcctcttataggccagccactttgctaatgactaaagagccactgaataagaaaactagggctccctgctgtcattagaggtacgttatagaagagaaatatatgctcaaaaaatacagtaaagtaggaagtgttagtgataggagaggaagagtgtcttgtgggaacagatgaaaggggacacagcttagaaagttgggtggaggatgtgccaagtcagtggagccctgtcaggtgaaagggtagggcagaggaggaaagctcaggcatttcacatagaagggacagtaggccaggtgtggttgctcatggctgtcattccagcactttgggaagcagaggtgggagaatcccttgaggccaggagttcaaggcccacctgggcaacatagccagaccccacttccacaacttttttttttttaactagcctggtgtggaagcatgcacctgtagttctagccacttaagaggttgaagagggaggatcacttgggcccaggagatggaggctgcagtgagctttgataacaccactgtactccaacctaggtcactatagagacctagctgtctctataaaacagacaaacaaacaaaagagtatatgcaaaggcctggcagctagaaacagcacaagggtttctgaagttcagtgtgttactaagagtctgtgactccaaactgtgttgcaaatatttctatgcaaatttcatgtgtgtgacagctttcatgtgttacacacacaggagctgaaggatcctcactgtcgggatgagatggcagccgcccgaggggctctgaagaagaatgccacaatgctgtacacggcctctcaagcatttctccgccacccagatgtcgccgctacgagagccaaccgagattatgtgttcaaacaagtccaggaggccatcgccggcatctccaatgctgctcaagctacctcgcccactgacgaagccaagggccacacgggcatcggcgagctggctgcggctcttaatgagtttgacgtaagcatcctggtgaggtacacagaggggtgggcactggtgttgacaaaaaaaaaaaatgtattgaggatgaagggccactacaataatttacattgatttttctcttttggaggttttaatagtaagataaactacataatgcatttctgtaatatattggctaagccattatcacttgtctttaaagaaacaactgtggctgcggtggctcacccctgtaatcccagaactttgggaggccgaggtgggtggatcacctgaggtcatgagttcgaacatggagaaaccccgtctctactaaaaatgtaaaacattagctgggcgtggtggcgcatgcctgtaatcccagctactcgggaggctgcggcaggagaatcgcttaaactcgggaggcggagattgcggtgagccgagatcgtgccattgcactccagcctgggcaacaacagcaaaactccgtctcggggaaaaaagaagaaacaactgtatttaagagtgcccaatcccttccaggtagatgagataacttacaggctattttagggacagttcataatttgacgatcatctttattattaaaggggcacatgttatgggcagcctagatgtacgttgcctctatgttgtgcctgcgtgaaaagctgccatcaatttctttgttttaaatcagtgataaagtacattgccctatgatcccacacaggaccctggtcttcattagaacagaccctctggggagagcctgtgttagttctctgaaagtcctacattctacactggctgtttctgtaggtgtgtcctggtgagggaagaagcaaggaggattgttcactgtgctgagccatatgtgaagcatcagtgtgagtgagaaggttgcacgcatgtcatcagcaccccgggatgacagcccccattccccccgggtcagaggacctgtgagaagttggaatttatttatcttatgatcaatgaaagcctacaaagatttataaataattagcatctactttccagggttaaataaccctgcaggggagatgagggaagtagaatgcactaaacaccatttaattgataaaacacaatgttacaggaattcatagaagaaaaataggttacttaatggtcatgaagaaagatgatgagcttgcttttgaatatgttgatgtgaatttttggcaagaaataactagttagcagctggaaaaaaaggtccaggagcaaagcaatgattgttcaaggcttggagatggatgatataactgaggaataattttaacagttcatactcaaatagttcttaccattttcatagtggtctctcctctttcccatatttttacagttagttatatgtatctcacaccatatattatttcctaaggttttttttgtgaggattaaatatgataatatatttaaagcacttgctacagaaatgaagacttaataataggtaattttattcacaaaattgcagcgagcaactgaaaattcatagaaaataatgagagttcaaaataatgtttactttatataacataaatatacaaaaatctctagattttcatcatgtaaaataaagtagaataacgaggagatattcacaaaacaaataatttttaaaaagttaattttattttattatttcttatatctgctagaaataagtctaatatagatgtgaaggacctaaaaagtcaaattatattactttattgagggacaagttttacttgtcagtaaatgatatcatgatcttgagtaggagaactattgatcctatcagttttcataatgttgaagcaatctcaatacaaattctaagaggattcttttggaacttgacagaggagtgataaaggatttttgtttgtttgtctttttttatattctagaataaagaatgaatgagcccatatttcagggaaaagtaaatgagcaggtcatacacacagatattaaaacattgtaatgctacattaattttaaaggtgtgtattgaaacacaaatggactcatccatgaaagaataaaaatcataggcaatctcaaatacaaaattattttataaattggtgtttattaaaattagttaagaatggattatttagtcagattttgacacaattacattattctagttataatttattttataatcaaaaataaacaacaaaacctaagtgaggagctggttaagagtgaaaatatgaagcacagagagaaggcctgtgaacagtccaggaacttcagctgctgccaccttctgtccaagagtgtgacaactgctgcttccccatgctgccttttgtttccagacgattttcattaaaagcaccttttatccccaattaatgtaacaaccgatgcgtcagtgcaacagtgcaaaaggctttcattcataaaaatcaaacttgaggtcatgtggggaaaatctattagcaaagtatgtcaacatgttgaatgttcaaggttttttttttgttgttgttgtttttcctgaagtgatatctcctcatgctggacaaataaggctttggaaatttaacacatgaatataaccatcaaacatgttttttataaaacatgatatatttgaaacagttggaaaaattaaaatataaagtataatatggtaaataagtcactaactatattttattaactttaaacttctatattaactaattatattacttataatattaactcagtatattatatatgaatgaaaaaattatattttatattagctaagtatattaatgaggtaatatattcttattaaatgtatactgtttctcaagctatgagaattacataaagcgttatctaatggtcaacattttacttcttggaggtcaacaaaaatcaaaatgtggaggctgtctgaattgcagttttgaaacaataattccatttgatgtggttccctaacaattgtcatttaacaaatgcaatttaatttcagcactttctcaaaagtagtaatgctagtaaattagtattgaatttacagactgtaatgtgattcacctgctgtagattttccatcacttctgacatcagcaaacctagacagtagttaatgatacttgaaattttctcattaaaataatataccgtttctctttattttatgactaaattataaatttctgttccatagttgtatgatgaatactgtttttttaaaaatttcttaggcatgctaacttgaaattgattttgaattcatggacatctgtcatgagtcctaaatgctattctcagatattaaacaaattgatatttcattgggtgaaaaactcactcaaacttcctgtggtttacttttctggcaaaatctcttactgatacttggtataatacctttctcatatagtgaaaatttaaataagtttaacgtctttgaaatgctgaagtaaaaggaaccataaaaatgcaaaatatattttcatagacagcacagctagtttgccctaaaatttattttttaaaaattttactttaagttccaggatacacgtgcaaaatgtgcaggtttgttatctaggtttacatgtgccatggtgatttgctgcacctattgacccatccactaagttcccttcccttgcccccaccccgcaacagtccctggtgtgtgttgttcccctccctgtgtccatgtgttctcattgttcaactcccacttaggaatgagaacatgtggtgtttggtgttctgttcctgtgttagtttgctgaggatgatggcttccagcttcatccacgtccctgcaaaggacatgatattattccttcttatggctgcatagtattccatggtgtatatgtagcacattttctttatccagtctatcattggtgggcatttgggttggttccataactttgccattgtaaatagtgctgcagtaaacatacatgtggatgtggctttacggtagaaagacttatattcctttgtgtatatacccaataatgggattgctgggtctaatggtatttctggttctagatctgtaaggaattgccatactgtcttccacaatagctgaactaatttacattcccaccaacagtgtaaaagcgtacctgtttctccacagccttgctagcaccaattgcatctatagcatctatctattcttgactttttaataattgccattctgactggcctgagatggtatctcattgtggttttgatttgcatttgtctaatgatgagtgatgttgagctttttttcatgtttgttggccatgtaaacatcttcttttgagaagtgtctgttcatatcctttctccacttttggatggggttgtttgtttttgtaaatttaagttccttgtaaattctgaatattagacttttgtcagatgagtcgattgtaaaaattttctcccattccgtagattgcctgttcactctgatgattcttttgctgtgcagaagctctttagtttggttagataccatttgtcaattttggcttttgttgcaattgcttttggtgttttcatcatgaagtctttgcccatgcctatttcctgaatggtattgcctaggttttcttctagggtttttatggttttgggttttacatttaagtctttaatacatcttgagttagtttttgcataaggtgtaaggaaggggtccagttttagttttctgcctatgactagccagttttccagcactatttatttaataggagattatttccccattgcttgtttttgtcagatttgtcaaagatcagatggttgtagatgtgtggtgttatttctgaggtctctcttctgttccgttggtctgtctgttttgggaccagtaccatgctgttttggttactgtagccttgtagtttagtttgaagtcaggtagcatgatgcctctagctttgttctttttgcttaggattgtcttggctatacggggtcttctttaattccatatgaaatttaaagtagtttctttttctaattctgtgaagaatgtcaatggtagtttgatggaagtagcatttattctataaattactctgggcagtatggccattttcacaatgctgattcttcctatccatgaggttggaatgtttttccatttttttgtgtcctctcttaattccttgagcagtggtttgtagttctccttgaagaggtccttcacatccttgttagctgtattcctaggtattttattatctttgtagctattgtgaatgggagttcattcatgatttggctctctgcttgtctgttattgatgtaaaggaatgcttgtgatttttgcacattgattttgtatcctgagactttgctgaagttgcttatcagtttagggagtttctgggctgacatgatggggttttcttgatatacaatcatgttgtctgcaaacagagaaaatttgacttcctatcttcctatttgaatatgctttatttctttatcttacctgattgccctgtccagaatttctaatactatattgaacaggagtggtgagagagggcagttttgttatgtattggtttccaaagggaatgcttcttgcttttgcccattcaatatgatattggttgtgggtttgtcatgaataactcttgttattttgaggtatgttccatcaatacttagtttattgagagtttttaatgtgaagcgatgttgaattttatcaaaggccttttctgcatctattgagataatcatgtggttttgtctttggttctgtttatgtgatggattacttttcttgatttgcctatgttgaaccagctttgcatcccagggatgaagctgacttggtcatggagggtaagttttttatgtgctgctggatttggttggtcagtatttgattgaggatttttgctttgatgttccttatggatattggcatgaagttttccttttttattgcatctcttctcagtttcagtatcaagatgatgcgggctccataaaatgagttagggaggagtccttccttttcagttgtttggaatagttacaaaaggaagggtaccatcttctctttgtacctctggtagaattcacctgtgaatccatctggtcctgggctttttttggttggtaggctattaattactgcctcaaattcagaacttgttattggtctattccataactttacttcttcctggtttagtcttgggagactgtatgtgtccaggaatttatccatttcttctagattttctagttgatttgcatagaggtgtttatagtattttctgatggtagtttgtatttctgtggggtcaatggtgatatctcctttataattttttattgtgcctatttgattcttctctcttttcttctttattggtctagttagtggtttatctattatgttatttttttcaaaaaattagctcctggattcattgatttttttggagggttttttgtgtctctgtctccttcaattctgctctgatcttagttatttcttatattctgctagctattggattagtttgctcttgcctctctagctcttttaattgtgatgttagtgtgtcgacttgagatctttctagctctctgatgtgggcatttagtgctataaatttcctcttaacactgctttaactgtgtcccagagattttggtatgttatctctgctctttggtttcaaagaacatcttgatttctgccttaatttcattatttacccaggagtcactcaggagtaggttgttcaatttccatgtgattgcatggttttgagtgagtttcttcatcctaagttctcatttgattgcactgtggtctgagagactgttatggtttcagttcttttgcatttgccaaggagtgttttacttccaattatgtggtcaattttataataagtgccatgtggcactgagaagaatgtatattctgttcatttggggtgcagagttctgtagatgtctattaggtacacttgatccagagctgagttcagtcctgaatatctttgttaattttctgtcttgttgatctctctaatattgacagtggggtgttaaagtctctcactattattgtgtgtagagacctattagtttctttgtaggtctctaagaacttgttttatgaatccggtgctcttgtattgggtgcatatatatttagaatagttagcttttcttgttgaattgtacccttcaccattatgtaatgcccttgtcatttttgatcttgtaggtttaaagtctgttttgtcaaagactaggtttgcaacccctgctttttttgctttccatttgcttggtaagttttccaccattcctttattttgagcctatgtgtgtctttgcatgcgagatgggtctcctgaatacagcacactgatgggtcttgactcttcattcaatttgccagtctgtgtcttttaattgggccatttagcccatttaaatttaaacttagtattgttatgtgtgaatctgatcctgtcatcatgatggtatttggttcttttgcacactagatgatacagtttcttcatagagtcgttggcctttatattttggtgtgtttttgcagtggctggtactgggtttcctttccatgtttagtgcccctttcaggagcttttgcaaggcaggcctgttggtaacaaaatctctcagcatttgcttgtctgtaaaggattttatttctcctttgcttatgaagcttagtttggctggatattaaattctgggttgaaaattcttttctttaagaatgttaaattttagaccccaagctcttctggcttgtagagtttctgctgaggagtctgctgttagtctgatggacttccctttgtaggtgacctggcctttctctctggctgcccttaacattttttccttcattttgaccttggagaatctgatgattatgtatcttggggttgattttctcatggagtatcttagtgatgttttctaacaccacagacactgtggccacccctccccctaggggctcaggcccagagagatccattttctgtccctgagtctctggctggagttattagagttgctgcagggaagccccacccaatgaggatggatgggtcaggctcaggcctgaagaggcactctggcagcagtctgccacagccggtgtgttgggctatggggaacaagtcttgggaccaagctgtccagcctccctggctccagcaggggaaaagcatggcctggagctatagaaatggatgtcacccttacccctcccaggaagcttagtgtgttaggcagttgtacctcccagggctggctgctgcccctccgccaaggagcataaatggcttagacagcaggcagccacagctgtggtgctggtcactactccccctgggagcttggcaggcttaagcaggttccagctgagatgctgctgagaatctgcgtagctctggggttgggatgctaggtgcctgtagcatgggtttgcaagtggcgtcttccgatccgtgggttgcacatttccatgaaaaaagcagttttgccggctgtgttgcatgctcactcactgccttccttggctgggggtgggggctcccatgccccatgtggctctgaggtgggccgcaccaccctgctcttcctctccgtggatcacgccagccacctagtcagttctgatgagagaacctgatactttggttgcggtgaaggattcatacgcttattaggtttcttttcaatgggagcctccgatcgcctctgtttctagttggccatcttggtcctgccctcccaaaattgaatttgaaacacacttcatattaatagtcacgagtgtgtcaaacccagttttatgggaggctggatgcagaagtgtcttaacattttatagttgatgagaacaagataaaaatagtattttcacatttatttgtctaaaattacaggattgatttctatctgagtagttataattgtggctaaatgcttggtgacctattttctggcatctacatgaatagttgatgtagtgatttatgaagcaaaagaatgaggaaaaaagcagtattttaacaacttgcaactgtcaagagagtttccaatgatataacagtaaaaagtaaaataattgataatcaatggaaaactcagcctctgtttagatgtggcagcttgagatggtcaattttaatctagtaaaactatctacaaaggaatattcaaaagatttaagaaaaatatagtgactgctcagaagtaaaacataatgtcgattttgactgccagaaaacaaactttcaatagtgggagagaggaatgttaaaagcaattcctacagaattttcttattttattaaagaaaagagagtataccatatcttgtttttggaatcttgttttgtagatgaagatactttcaaaaaatttcaactgacactgttcatgaagctcctttccaatatctttgagatgcttcaacatctcaaagatgttaaattatttaaattgtcattacattagaaaggtattacaccaagaatcagtaataaattttgccagaaaataagccacaggaagtttgagtaagtttttcacccaataaaatatcaatttgtttaatatctgagaataacatttagtactcaggacagatgtatattacaagctattgctgtaacaaattaaaagtgacaccatttgcaaaggtacattataatctttagctattcaccttttaaaaatgttgttttcttttaagtcagacagtacacattatcttgacttcttctaacatttagctttctatttgtgatttgctttctttctcccaacttgccctgggaatttgtttgactagtaattctcttgttcttgctccttcagtttctcctccacttgttccatctcctcaacctacagaaaatgtattccaattctaacaacctaaaaagaaaataaagcattgggctgctaaaattaccatattgccatattttcgttatcttttcttttcctgacaatccacaatcctctatgctaacctcggttcctccctgctcctcaggcactctacctgagtgtctccagagactgtcactcactcacaaaattgataggcttttattttctacttttcgaatacttcagctttggaagggagcacattattatactgaccatgcctcctctttctttctattaccactaatatctcttgtaagatttaaatatctgcacttgaggaataagacattctattctcaaccacattaagctgaaatgttaccctggtatagcaactctacataagttccccgtcctatttttacctaattttccctacctgcctttaccttcttacattttcttccctttttcatcatctctttaaatatgcttttttttttttttctgttcttggtcaaattgtaattctctttccgatctggtattcagtggatggaaatattggaatgttaacatgagcagtgatgcgacatctgcatctcagactggtgcacggaaaaataatccctggctggcaagaattgtatgtaggctaactgtgaggataaaataattgtctactgggggagcacgggccatgcttctgtggtcactgcccaaagcttatcccagttgtaggcttctctgggtgcacacagatattcaaggagctccaggccaaagaatgaagttcagccgtagtagttcacatggcagcagtcatttcaggttcccagcccatttaagggacattaagaggttgcaggacctttgaggggattcacaacccaagattagtatttggagatccagggttggagtgcattttcagtggagaacgaaacgctgtataggtaagtcagaggcccaaatataagacctaggagatctacactgaaggcttccgaataagtgagggtttttctgttgtgcctccatttcaaatgccacttttttatgttttttgagtattgtgataatcaattcttattgttcctagaatcagacagatactgctgtgtaagctctggtcccttaaggggccatggcccagagttctgactggctcatggattcttaatatgctttattgacttatgatttcttcaacatcagggaaggataagtgtctcctgggaaaataaaattttcaccaaggatcttgttctgtcccttctcaattctagtatttccttttgctgtagcaaccaatatacttatttatcagggaaacttgccccaggccttatctacttcgatattttataaagtcatttgactacagacatctagcaaccctccatgttaggctatgaagattgtaagtttcctatatcttacattacattagaatgaaggtgaagagttgagatgacagggcccttctattaatgctccataataattatctctgctatgtgtctgagaagtgattcccactgaatggccaatagaagtaaccaagaacactggaaagagtccaggacttggattcaggtattggctactactccaagctctacaaataactaagtatgtgtaagcatgggctactaagcccatctctaggccttggattttatatctcttaggataaggtttagccaccagatagctaagatcattcattcaaagtgtatatgtgccagatgagatagaacaataagggagtgtcatatgtaaaaggagaaaatacttagtaaacagctatagacgctgcaatgcataaatgctgctgcatacgcttacgtatatagtatccacttaacctattatgtgtgcgtaagggggtggaattgggcaagatgaaattgtggaataattcttggaagaggaggtaaatgagctgcatctaaaggctaagaaagaataaacatgatgaaatgtgaatgagagtatttctcaggtagaaagatcatcattgcatgcagttgtatggtgggtaaagcctgcataaagtgattatttctggggtacagaggatggggaaaagtcagtctaagtgggcaaataggagaccaatcctgaagagctattcagccttgcaagtggctgggcttcatgctgaaggccttaggaagttactggtgatctaaagaaggaaatggcagccaggcgcggtggctcacgcctgtaatcccagcactttgggaggccgaggcgggcggatcacgaggtcaggagatcaagaccatcctggctaacatggtgaaaacccgtctctactaaaaatacaaaaaattagttaggcgtggtggcgggcacctgtagtcccagctactcgggaggctgaggtaggagaatggcatgaacccgggaggcagagcttgcagtgagctgagatcacgccactgcactccagcctgggtgacagagcaagactccatctcaaaaaaaaaaaaaaaaaaaaaaaaaagaaggaaatggcatggtcagacttgtggggtttttgttgttgtcgttgttttgtttgtttttgtttttgagacagggtctccctctgtcacccaggctggagtgcagtggcatgatctcaactcactgcaacctctgcctcaagtaatcttcccacctcagcctcccgagtagctaggaccacaggcacaccaccacacccagcaagttttggtatttttagtagacacatggtttcgccatgttgtccaggctggtcttgaactcctgaactcaagtgatctgcccaactcagcttcccaaaatgctgggattacaggcgtgagccacagctcctggcccagacttgtgtttttgaagatccctgtggctgcagtggctgccggggggagaatgagtttgaagaagcaaagctgcagagtagggagacagataagcgtgagaaattaggaatgtctgcagtatatcaatagagtagaattaggaagaagtgggtgaatctgaaccatactgaggaagtagaatcaacaggtcatgagaattgtactttttatttccatatattgaaatagtgttttgtattgtcatgtaagctttagctaattaaaaaaccaaacattttctaggtctaattatgaaatcttgagaaatttcagtcattttttggaaaatttgatgtttttacataatataactttcttgcactgatttttttggctcttagttcatttccgttcccatcagtatgattgttaaatccctagtcatttatgcagatattatatattttgaatattcttaaacaaaattctacaaagtctaggatttttctaacttaggttaatctgtttgtgcttaattgggctcctactatgtgcttagcatgctctttttacttcttaaaaaagaaaaaaacaactttttgatacttttttgaaaagtggagacaaacttttccatctttagggcatagtatcagtaactgatgcttagtgggaaccagaaatcctcacctgttcatcgtatcttctcccagtggagtaccttccaaatttatttcttctttttcaatggcaaattaaactcatcaaaactgccttttcaattctttctaactggaaacaagcaggagcgttccagcattctttatcctacactgacatctggtggccaaacaaagcattaagaaacactcctgtgggttcttagatccctgtaaacatactacaatttatatatgtaatacgggctcaaacccaagggatgcaaatatggacagtgtgtagtcatccgtcaaaaagtgtttagtctacctatgacaaccttctgaacactaatgttatgcaatgcaagtccagctaattcttaaaaccatccctacctctgggatggtgataaagatagatgcaatacatgtgagcttataggaagaggagtgcaaggtagggtggtgagtcaaggctggttctgctgggtgcttggggaccaggttaggcatcatcgtagacaacatagtcttcactgcttcctgagctataccgcttcactttccagaatccatcttttctgcccagaaatctctttccgggttattgacacctcttgtataggttatcgatacctctgatattgcttctaaacagcttttctttcctaaggttttataaatctaggagtattttctgatagaatcatttacctttcaatttttttacttgctttaagaaatattccaaaacaatttacttttctcttgcgcatttcaatcactaaagatctctaaaaattgttgagcaaataaaagaatgaaatttgaagtacttttttttataattgcaatttatatcttgattttttggccccctatcaggtttaatcaaaattattatatttccaatcttgggttatttcttgaggcagcgaaaaatgtaagaatctgttttcttcctagtgtgactgatttttgcttttgagaatattgacagattctttaggtctgatttcacctttatttcaagttagtaccaaatataataatgaatactgatgtaattgattatgatattcaaaattgtctaacatgtgatggcaagtataattttgattgtcacttatctattagttatactttttcaaatttcggacccaaataaggccacttatctagtgaactctttattagagcaacatgtggtttatttaaaatgtttgattttttaatctttaaatacatttaatactttagtctttctgtgtgatttcttatgttagtactgctaatctttacttctccctccaggattatgacttctcgtgtgcttcctatgttacagtgctgggaacgtgatagggagttacttaaatgttctaagatttagtttgattcagtggtgaagtaaaccacacacaaacacacacacacacgtgcaacaactgcacgtgaagcatccatttggatttttcaaccatactgctcaacgtatttcctgaacttcttttccagcagaatattatggaaacttcactataacctattgagtcccattctttatttccccaaatgttctctgatactgtctttttttctgattgtataaattcattgagctaaggctgtagaaaaacaattactcatatgcacgtatgattagcaggcacccaacataactgagaacataaatagtcggttgtggtttgacctggttacattggccatgctaaacaatggtgggacagcatctcatagggcagagaacaggcttgtgtttgaatcttaccaaataactcttccctctgtgcctctgtttcttcatctataaaatgagataataatgttgactccaagttggtggtagttttgtgggatgaacatttatatgtgtctaatctatagtaggcactcataaatactagttttcttcttctcctacccatcttaatagacgtgttggccagacatctttcatccagattcagctgtgaagctattccctagaaaaaccctgggaaaaagctcctgactgaaaagttgttatgccactggagagtagctattgatattataatgtcatttgctctcccttgcctatagccaaaccctaatgcataacagactccaaagaaggtctggccaaagcataaagcagtcttgagaggctggccattctatgtgacaggagaaattccaaacagattaaattacctcttggtgtaagagtgattcttaacgtgagacctaacaagtccagtgtgaatactaagaatgtaagtttctccattgtgtctatttgggaattcttattgcttaaccagcttctgatgctgtgaatgccatttttagtttcacattaaatatgagatttcttctgctttgttggtctctgaagattgctcagcgagcacctggaataaagaggagcgaatggcagaaagcgggtagggataaagggagaaaagatgacatagactgtggtccctgatgaatccaggaaccacagcctgaagcagtttatcgtattttaaacatgttctgtccaaaagatgctgccaaataatcatgcaatctaagaatgtgcatggtatgcaaatgcagtttgaagacaggtcctgtctccctcccaaccagattgtctcttccccaagtgtcctgtgaaggagtttgaaactgacactgcttgttttccaggtttagtactttcctcactttagcagatcctatgaaaggaccaggaaaacattatttctccatccatctgtttgaaaatctcttgctgttatcatctacaaccttaatcatgcttcttaagcttatttgggacactgaggtctacactggtgatcgtctggatattattttcttttcctttcttctcttagttttggcatctgtttaaaaagttttaagataatctttcacaagtacacagcatataaaatatgttgtctcagtttgtttgggcttctgtaacagaataccttagactgagtcatttataaacaatggtaatttattgctcatggttttggaggccagggagttcaggataggtgttgacagactcagtttcttgtgagcgctcactctgtgcttcaaaggtgatgccttcttactgtgtcatcacatggtggaaggggcagggagcccctcaagcctcttttataagggcactaatcccattgataagggtagatccctccagatatagtcaccccacaaagcccacacctcttaatactatcactttgggtattaaattccaacatatgaattttgagggcacacagacattcagaccataggatatttggacatttttctatatcaaaataaaaagcgcagatctttacattttacagcttcatttcttccaggagatgcccatacatattacttgagggcccaaatgaatttatagttgggaggttttaactacagggtttcctaagatattttctgtgcctaccaaaactgaccagatttgcatggaagttaagaatcgtgttttattttaaagcaagtacatggctaatcttctcaggtgatgtatttgagaactgaatcgctgtgtagaatttttgctctaattaatttgaatatatatttcaaagattttaagatcctacattttaacaacacaatcttgtgtttggcacaagtacttaagataaaaaacatcactgaccaaatacaagttttccatggacatttttcttttacaaagatctgtcacagatttgaagaagatgacatttgtagagatctgatggagcggtaggtctcttagggaggagaagataacgcggttatctgccaccaacccccagagtgtggcagccctttggccagtggatgcatgctgtttttattttcagattctctcaagtctacatgtcagaatcactttcaaaatctggatcagcaaaataaacttaaaatgacataggcaaaggcacacttaataaatattacaataccttagaaattagttttcctgaagtaagtaggaagaaacaaatttatactgaaaatgcaaaacaacctgaaaatatatatatatatgtcaaaatgcttatgatttttcttttgagttgtggtgactgtgaatattttttcctatttttattattttccaaacttttttccatgaatattctttaataaaaaatatgcatagtatttgcgaaaaattaaatctgtttacagatatgttgcaaatattaaagtagtataaggaacactggtatgtcctttattaactattgttaatattttatcatattggcttgtcatttgtatacatgtttgctcttctcccatacacacactccttaactatttttaagtagataaaatcaactttattttacatttttacatccatatatatacatacagacacttcagagaatatttctttgattctgttaagatttgtggatttatagaagagttgtaccagagctcctgtaagcttgctagttttgcctagtttaagtattaatttaatggaaggctatgtataacaaaacctctgcaaatattgactttagacagtcatggccatgaaacattgtgtccctgcaaataatcactaaccaaagttatactaattcatgcacgcctattctcattacctgtattaaaaaaaaaccccacaaaatagagtaaaatttgttcctggtggattatgaaataatactgaaaactttcttttccgtattttatgaacctttacttaagaaacattatttaaaatataatagaatgtgatttccaattaggtcagtgtaaataataaaacacatgacattttaaagatagggcacttgtattttatccccagtaggggaaagaaagagaaagagacaggcagacaaagagacagacagagatctgcataatccattcatttctgaagataactagctactatgatgctgcatttcttttctcataggcccataaaacttcaaaattgagaaagatatttgaggccatccagtatcactttcataatattggaagttcccactgcaacatccataacatctggacttttgtctttgcaggacattattgagaggaaatattggggtggaggcagatgacttgttctaattgttaaaagctctaattgttaaaaataaagaaagagtttcttcttacactgacatttccaaagtaaattaccaaagcactatacccgtccctgattgttagactttaccacattattattatggtcacagacatgtcttatttccatgacgtggctgagaaatccttgatgagaaaatctcatagcaatctctccccagatcacttttcacatatgataggtagtaaaaaaatatttgagaatagttgattgtgccagactgttgtgtctcattatgaaaaaaagcctgttaagtgatatcttttccaccgttttgtcctccttcagcccgttttctcacatggccactaaagttaactttctaaaaatcataggcttccatgcctctcttctcttctgcttacacaagaatctctttccagaggtcccactcacaactacaagtaggttgacttatttttttatgggattgggaagaggaggaggctgctggttcttgtgaggttttcaagtggaactgccttggttacctctttggttaaaagttaaagatattaagtttcaatatttgttactttaacaaaatgtatgctatacattgagttaatattgaccaactctttaatttgggctccccaattttagacatttacaatccaacctaaattaatatatggtggccaattgccacacccttgaaaaagtaaatgatgagtttattattagagaataatatgctaggaaataaggtataaatcatatgtatcagtctttgacccaaaagcttccaacaaactgattctcaaaccagtgtaactttgattttctattacttttgctaatgtcaacaaccctaatcctgcagtttgttctttagagatattttaagtcaattatgctatttatgtttttacatttataattatacaaataatagttttttagactaactttatctgaggataactaaactttctcctgagctctagacatctgtttagctgtgtatgtaacatctgaatttgaatgatttttaagtatctgaaaaattctctaactaaattgagcatttttattctgtcaagcttaggctgttttcttcttcttcttcttcttcttcttcttcttcttcttcttcttcttcttcttcttcttcttcttcttcttcttcctcctcctcctcctccttcttcttcttctctttcttcctcttcttcttttttaagctaaaggaactacgtttggtaatatagccattgaatccagaaaactgagaatcctgcccacttttctctccagttaaccttgatatgctatgaattcagttccctttagaactcttgatttgtttctcccatcttcatgaacactggctaatcaggcccatattttttgcctggatcattgcaataacttcctaactggttgccctgccccccgccccaccaactccttccctctgtattccatcatcttggtaagcccagcctttctaaaatgctagtcacatattatttactagtaaaactctgtcttcaggatcaactttaaagctcttagcacagtaccaaatcgtttccgtaggtccctgcatacatctcccattgcatagcctccttttccacacattgtattccacattctgccgtaatgaactgtttatcattttcaggtacatagtcactgtttaatccatgtgttggccctcatgggagttcctctgtctgttccttccttcccttcttttctgaataataaatttatattcagccttccagatctacttattttttgaaacctttcctaactaccccaatttctatgccactattccttctatgctactattgtactttatgcatattgttaagaatattgttctgttttttgtttctgtctctccaaatgtgagcaccaaatagacagagatcatgtattgttcacactttcacatgcacttttagcacaaagacattaaagaaatatttgttgaatggctgcttaaatgaatatattaactgtttgatcttagtagctatcagtttatccatcctaacttctcagtcttctggaatgttggtatatgccataccaatcacaatagatagcccatggctacatgatcatgctattatgttccaatgggcacgcatcatcttcttgagttaactctcttagggcttctcttttccagtgttacacagaaaatctattatatataatttaaatgatcgttaacagatgtgcatcacaattcagagttcaaaagagaacatgacattctcattaagcaaaaagcgtattttcaggccatgcaatgtttcttgagaagcaattaacatatcacacattattcctgtgagacaaaaactgtttctttcccatcttaatttgcctgcttaaaaatagacagaagaagatagatgagtttatgctcaaggtgtatgcatttcccttgcggcccgtgaacacatttccttttcatatttgcagaatattggtacaattattctttcatcagacatgaaatttgagtgtataaccagtttgtggttatcacctactaatttattaggttgataacagcaattaagccacaattgcttctgagaaatatgaattgactttccgttttaaatggataatttagcatctcaaaccaccgacatagagtttaactaatttctgggataagaagtttgtttctcctagtattaaacttaaaaaaaattcaaccattgatcatccagttactaattatttaattgtgggattatgtggtttgtgaaatttcttaatttttttttttttttttggctgcatgccttttgactatttatgggtatcgtaagggagaggattttggacagaaatgtaacatatcagtagtaggcccatggtttatccaccgacttaaaaatgtaaaaattattattagctttataagcttaagaccatataaaaatgggcagcagatctattttggtccacagaccattgtttgttgaccctggcttaatcaaatcttcagaggagattctcagaatttaccaaccacaggaggtggctgtctcagctggtctcctgcccattgaaagtagaattaggctgagtgtggtggttcatgcccataatcccagcactttgggaggctgagggaggtggatcgcctgagtctgggaggtcgaaaccagcctgggcaatgtggcaaaacgctgtatctacaaaaaatacaaacattagccaggtgtggtgccatgtgcctgtagtcccagctgtttgggaggctggaatagaaggatcacttgagcctggcaggcagaaattgcagtgagccaaaatcgtgccactgtactccagcctgagcaacagagtatgagaccctgtctcaaaaaaaaaaaaggagaactaacgtttgtcatatgacaataggttactcatccccattccaataattctgaatctcaagtacactgaaccacatcaattgctactgtagacctaaatgtacatatctaactaaaaggccatccacatatattcatctgcaaatattaggttcactgtagtgacctattttgctccagaagccttttggtaaaggttgggaaaaggatattcttgttttaggaatcctgactccactaatcagcaaatgtttatcaaatacttatgtatgaaacattcagctgggtggagcagaagataccgacctataaggaaagcatcctaactggtgatctgtttctctcacacacacgtgtgtgcacacaggcgcactgctgccagtgcatggtaatatcagacaagagccaaaagggaaatttgaataagtgaaaagaagcttaataatgggaattaaagaggaaagttttgtacacaagagagttaaagatcgtgtttccagagaaggatccacatacgctgccaagaagcatcagagaggaaggggctgaaacagtcagcagagaagaattaataacacggttacacatgaagcatactggggtggggcaatgcagagaccactttggcaggagccgggggttcatgaggagagacgaagtttgagaggcagagacttgcgccggattgctgagaatcttgaaggccaggcatcttagtcatgaactgagtagaggtgagattatattttttttacacaatgcttgctgaaaatgacatctcaattcaagggctggatgaaaatgcaactcattgctttattcccttatgaattttgatataactcacaaaattaatctaatagaaatgaaattggagaattactaggtaagagtccagcatctgaaacttgtcgggtcctagataataacctattacaggccatggggagccgttgaaggtttgaggccagtggggtagtgtggttaagcaggattttaagactaggctgttaggaaaatatgctttaccgagaaaaaaaaaagataaatttaaagtctcgatgaaggaaatgggagatgatcatgacttgaataaggggggaatatggactgaccatggaaatataaagtattacattaaaaatagctatttgaaatgatttgatgtttaatatctataactcactacatttcatatattgttcaaatctctttacttatattatttaactttctcaacaacactgttgtataggtactgctaagattcattcctgtttttcaaatgaggaagctgagacgcttttagcatttaagcaacctactcagctagaaagaattacaactagaaggaattggagccaggtttctaatccaagccatctatcttagtccatttgtgcttctaaaaccaaatacccaagaatgggtaatttacaaagagcaaaattttgtttcctcacagttatagcactgggaaatccaagatcaaagtgccagcatgtttggttgtctggtgagggttgttctctgctcccaagatggtgcccttcccctatggaggggaagaatgctggatcctggtatggcggaaggcagaagggcaagctagccaaatgctccttgaaacctcttttataagtgccttaatccagttcaaaagggaggagccttatgtcccaatcagctattaaacgtgccacctcttaatattatcaccttggcaacacctgaattttggaggtgacacatgtaaaccatatcaccatccaactcttaacccctgtaacattttataccttggtcttagattatatatatggtttcttttctttcttttttctttttttgagatggagtctcactttgtcacccaggctggtgtgcagtggtgtgatctcagctcattgcaacctctgcctcccgggttcaagtgattctcctgcctcagcctcccgagtagctgggattataggtgcccgccaccatgcccaggtaagtttttttttatttttagtagagatggggtttcaccatattgagcaggctggtctcgaactcctgaccttgtgatccacccgctttggactcccaaagtgctgggattacagatgtgagccactgtgcccggccggtcttagattatattgatgcttgatctttcaacataggttcccaagagaacacagctacaagtgcacgggccttggagtcagaaagacttctcaagtcttccactgtgtggccttcatcaagtcacctaacctgaccgaggaacggttcttgcatttataaagtgaagatttctcattaattctaatttctcattaggagaatgaagggagattatggattcttgtttcccttctacttccatttttcctccttataagtgagagtgttaggttttggaggaaaatgagaagtactttctcatacatctgatatttgaggtgatggcagaactcccaacagatcatgtccagtgtacagctgtagtaagggccagcttcttagagggtcgggattggacatggtactttggttctctttcacaagcaggtgatagtagagagtagttgagccctctaagaaagagttgttgagaggactactgagaacagggagcagggccttgagatataccaacttactgaggtagatccaggaagaagaactgggcaagtgaagggaaggaggagtatgaatagaaccacagtaaagcagggttttgtaaagcataggggaggcttaacttagtcagcgggtggtaaattgtgttcaaaacacacagagctcaaagaggatgaatactgaataaaaacgatggtcaagaatgtagaacgttccaggagactagagataacatgactgttttttttcaggaaaagaataaaatccatttcctttgttaagccctctaaaaatctgatttgattaagtgcattttggatactcactttctaatcaattcataatataaagctaaggattattatctttgccctgctttacgtacttaattgtaaactagtatccttgtcggagctagagaatgtgctcctgaaatgccatagcaactcagcaacacacagagatgatgggattagggaaaatgaagttggcatccactagatttcacaatccagtaggaacagcccagagctgaacttcctcgcccagtttattcatttgctttggtaaatcactttgtctttctaaatataagcttcttctcaaaaacgaagctaatgtgagcttaggtaaatttctcttaaaaaacacattaagtatctaaggatagaaagtgctgtttaattattaagtcattatctttgtcatttatttccaattaaactgaactgtttaattacaaataacatcttaagtagataaatggcataattagtttatttttaactatatgcctgcgaagcaaaagttatttataaaatactttgcaatttaaaaattaaggcaaatctaaaatggtggttagaatttttctgtagcttaataaaaaatacatgattaaaactcaaggtccttggtatctttcattcctagtgctaccccaattacgtcaagagaaacttttcatgtaaagatagaaagattcaccctgggaaagcttggcacagaatgaaaaagatgaaaatgtatctgtattaattattgatacactacagggagagtaagtgtttaaaaccaaacaaataacattcttttgatttagacacctcggttaatttatttaaatgatcttgatttatgcttttatctcagagtccagtctttaaaataagtatttaaagcattcagagccagaattatgatcatgcctcattgtctataggtgtctttcattctcaattttcagtgctgtaaaattccaattttatttccctgtttataggcattttaatgggaaactgggagaggctgcctcaggggttactagtcaagtattttaagctggatagcaaacttttttctttgttttaagaaggattccatagtgaagagttaatcagtaggtattgctggacttgtttatgttgttttgtttggtttgggattgtatcagtgcatcaaaataacataatgaataaaataaaatgctttaacaaattttgatcccactaaagctttctgtgacctagacacttggtaatgggtcaacacagcatgaagtcctaagctaaaccaaagctaacatttctatagtcatgctcagtcactgtcatatttcacctgacctatggcatcggtacctgcgactacatggctttgccccctcttcgttatgtggaaagaaacagaatcttgaatttaatgcttgggaggaagaaggaaggaagctctgtggtatccgtgaaatataaaacttacccagttataccccaagacaaggcaaaccacaaaatttaaatattaaaaggtaaatagaagagccaataataattcataatacatttaaaaataactaaaagagtataatgggaatgtttgtaacacagagaaacgataaatgcttgaggtgatggacacctcatttaccctgatgtgattattacacattgtatgcctgtctcaaaatatcctgtgtaccccataaatagatacacgtactatgtagccttaaagactaaaaatttaaaaatataaattttttaaagggtacatagaatggggatgatgattaagttacaaaagacagaaagtgaagacatgggtacattgtagcacattgctgggaaaagctcagaataattaatggagaaatatacctacatttaaacatgcattgtcatttaggttttctggttttcattgctttaattgccccatatcagaaggacatattcctttgaaagaatgactttgactaatgttaactttctctttcagttttttttttttttaagatttaaaagataaaagtgaatgactgcatagaggcatgttgacatttattctttcttctgcttgcttgattcaaaatagtcatgctggacagcaggtggtaagtgcctggtgtttatgaggcagaacagcaatttactattttccttacttgttgccttgaactatgaaggtagtaaaaatccaggacacatttgtcttacagaattgtcacaatcaacaaagaaaatcacagaatcacaggactttttcataccactagcatttgcattttccatgctgattagcttagattttggaaaaaaagttatgaaaatcagccacactttatattatcaaattgctttctttgttgtctttcttggcattttgaaaattctgtgtacgtttcagatgactaagtagttcacttaaaggtttaaccaatgttgaaagccagaaagtgtaaagatgagtaagattttcttcctactctttaacaagctgtttcttggctagtaaagaccattgtcagctgtgcactaaaagtctttgaaacataatctgtgggtaaaaccattgaattagtgttctatgtgtgctagagctttcctactgacttaactgtaattaaaaacattactttatgctccaggtcttgtcaggtatgcccatctttctcaattacagctgagtacaattagatacaaactcagctttaagacggttaactcctagccaaagaaagactgagcaatatttgtatttaccttcttggtagaagaaatatattgtaatacctactgaccagtttgaaacagaggtgaggattaaaattaggagaaagtagcattttagaggttttattcctggtgattatttgctgtttttgatcccctcttgaagtatgaaagaataatatgctactgtgctactgtgactttagtttttgaaatggggaaatggctgttgcattgattccctcacgatgattagcatcgtgcatgcagaaaggatacatgaggtaaacaattagtgcagtggctaagagcatagacgccagagctagagggcacgcatcccaattccagccctgctctttgccctgaggtcatgcctgcacaataattcatctctctgaacacatttcttgctacatctacttgacatctaggtgtgtttttttgctttgcatttcttgttattggatattaggtcttcctattgggtattccttgtttatatgaaggcgatagattttgcatattaatacaggtgcccataccactacccgatgttcatatacttataatcaaccttccaccagacttctccagttaaagggctcataagaacttcacctgctcttcatctgttatctttcacagttgttcaaggatcagcaaatgttttcttcctcttctttttttttttttttgagatggagtctggctctgtcgcccaggctggagtgcagtggtgcgagctcagctcactgcaacttctgcctcccaggttcaagcaattctcctgcctcagcctcccaagttgttgggattacaggtgtgtgccaccatgcccggctaatttttgtatttttagtagaggcggggtttcaccatattggccaggctggtctcgcactcctgaccttgtgatctgcctgcctcagcctcccaaagtgctgggattacgggcatgagccactgcgcccggtcagcaaatgttttcttgaagggccaagagtaaatattccaaggtttgtgtgccatacagtttctgtcctaaccattcccctctaacattgcagtgtaaaaataggcatagacagtatgtaaatgaatgagcctgactgtgttctaataaaactttatttgcaaagtaggagtttgactcctaggatgtagtttgctgatatctgcattattggtgttgttagtgttagaggtctaggttttatctttgtctccttctccctcattgtcatagcctatatattttcaaatcctgccagattgacattctacatttttcttaaattcattaccttctctttatccatatagacacaatcctgatttgtagtttcctcacctctcttttgggctctgaaggcttgatgctgtcctgccttctgcttgcagtcctgccaaagctaacttccttagctgcaataagaaactgtctaaacccaaacaggattatgtcactcctttgctttaagatctctgatgattcatcattgcctaaaggggtgttctcaaattgaaaactttgtaacatggcagagaagtcgcttcagaacctggttctttctctctctccaactgcatctcccattcctatttatgtccattcaggcccttgaggaagcaaggtagatgggattttatgtataaggaggaattgcctgtgaaggataaaataggagtgactgggcttttgtggagcttttagactgctatggggacaaacacctttgaaaggagagcaggaaagaaagtggattgagtaggaagaggctcagcactgttcccagcaagtcccagtcaggccagtggggagcccggatcaggagctgaagctggtcattggaggagtccctgttgggcaggagcatgcgcctgtgcttagtgattgactggcgctgcctggggtcaagtgcagcctacacatgagactgcagtagaactacaggtgcagcagatggagatggtcagttaactatgccccccagcagtttaactcagaggagagtggcttggggcccctctatggcaccgtacatgtgaccagcttcagttgatctcttgtaatatttttcatataatatgccatctctcacctcctagcccatctgcattgccccttcctgctcctaactttgcttggccaaccgcttttcactctttaagtctcagctgagggataaactcttctggaagtatttttttactttctacctctcaactgtgcaaattgccatcattcagtcattccataacatcattagccatttctccattacaattggttgtacatatttttgtgcttgattagagagtcaacctcttgaagaaaggattatttaatatgtgctcttagactcctacagtaactggcactcatttgttgaatgaatgattatactctcagttatctattgggagggttaggtgactcagatagcataaaaaggacagcatgacagataatacttaagtattatatttaatttaaaagaattaaattttcgttttaaagtaatatactttataattgtaattatgacatattagactcatttcacctaaatgtggacaatcttatacagttgaaggaacactgggcttgaaatcaaaagacctgtgctcaaatcctggtgaccttatttgtgagctgaatgaccatgggacaacatctctggcatcatttccctattcaataagatgggaagatagggatctcaaagacactgcattttgaacccatcaaaccatttgtaatacatccaaatacttgctttgatggaggtctgtctgttttctcctcttatgtcagagcttgcatcaagccagctcggtgtctcattgtatactgaaattttagatcacatagctttttgtggagacaatgaatgataagagcaatttaaaagtagtgctgttacaacaattgtgtgtgtggtgagtgctggtaaatgtattattctgggaagtagtttcgaactacatagtctgctaaattattttaggttaaaatttttatagagcgccacatgagagcaaatgggagatcaattatgtgagactagagagactgttatagcaccgacttgaaggcagaataggattctagtcttgttggcttgggggtgaattattgtggctgttatctttatgtccatgcattccaattgccactccataaactgtaagaatgaaaacaataattttttaaagtagagatgttaataaaaataagtaaaactcataaagcacaaaatagtatgcaaagcaaataagcaaataagaaaatagacatgataaacatagattaacttaaaacataagaaaaagataaaataagaaatgcaggccctctatctgtaaatgaactaaaatgacaatgtaagatggaactaaaaggtcaaaaagataaaatgactaaatgagctttaagaatgccgacaggagatggggatatttacaatgtaaaagaatgaactaaaataagtctgtaaagttgtaaacagcataagagccggtcacaggagcatacttttgctgcgaagggagagacaggaaggcttctcctcatcctttcactctttggtgttggtgtgctgccctcttaaagtattcttctgtgaccagggaggggaatctggctcctggatgttgatgatgatgatgatgatggtgatgatggtggtggtggtgatttggtgccccttcctgctagcagagggcagccactcagagaggtgaggacaggcagagctggtatggagaactgaggcctgttagagccctgtgttcatggctgtttgctgatctgaatgtccctgaagtgtgttaggatagatggcttacctgggtgtttcttagttttttaattactttcaaattatacaatggcaaatactcctccttcttttcactttttcattctctgtatatttcttgctcaggatggattcatttccaggggttggttttttatttgtaggaactatagatacagccttttcctctagctcttgagcctctggtttcatttctgttttttccttattttctcgcttgttggagcctgttggaaacctggccaattctctaaaaacagacagagacagacacatacaactacatacacacaaataagccacagccccttccatacacatgcccgtgtgcatatacacacacgtacacatacatgcatccactccacccatgcatacatactgtaccgacccattcatagattcataaacacacacacaaatagcacatatcttgccccatacacacatacacacacagctccacatacacacaaccagtgcccatctcatccgggatacacacacacacacacacagacacacacccacatgcaatcagtacctcttcccgtgcacatgtgcatgcacacacttacacaggcccacgtgcactggccttttttctttgtgccttttgtctcccgagcggcttctccctgctgcttttcacatccatcattgcaatgctccccatctgtactgcagatacagatctgaatattgtaaaattattgtttcttttccagggagattttttaaaaagcttttccactgtgatctgtaaataatgaataattccattagaaatgtgatggatagtgtaacttttatgcagagtttgtcaagctcaatgtttcaggcttttactttcacaacagccccaggccatggcaggtaggaaactcaattggctgacactccaaagtctctcttgtcacatttcccaaagtgtgttccttgggttctcatagataattcatgcgttttaaaagcagcactttccatgctcgaatagatttgggaaacgctacagtgaactgactcctttagtgcagagctccccaaagcatttcatatgataatttgctgtaggtcatgcggtatttccaaaacatatttggccagggaaccttattttttcatcaaaacattatatctctaagctcagtgttccatggaaaataatttaggaaatagtattctaatgacactagtacattctctctactgcagagaaactgttttacaattgtccttactgaagagttcaaatttacctccccatatttccatcacatttgcagttcttgacacgtttagtcctaaagtacaataaatacctgttctaaagccagtatatgattctgaagagtctcctgaaatcttaaagcagaacatatggttttcattatgttttatgttaatatggttttctataaaataggtctttgaaaatcagtaatctttataagtaagatagtctaattatatttttaccaggtatttcttcaattagaatattatttcttaacgtatattatatggattatatatatacacacacacacacacacatacatatatacatatgttcatcataaatgcatcaacagaaaggcagtagaaagcgagagagagtatgtgagagaaagagagatggttccaatggatgcccctggaaagagacattgcagacacaacactagtacgtatagcaggaatatctgtgctcccctctcagctttcctttgggactttcacctgtaataatgaaccctatagggccatccactgtattgcagcctccacatgattttttgacgctcaacagctgtgcctaaaaccaaggcacaaaggacaaaacccaaatagcacattttgggtaaagtaaacatccctttttcatccgttttctaagatataagagagtacaaatgtaagaatgatcatcttgccaaagctggcacagaatagctgtcttatctgcaagatttcatgcactgctttctaaattgaaaagaggctttgaccaattagtgattttctaaaaaatccaagattccagtggacttcagacatggtctgtgtttggtgtatacctgttcctttctaagtcccaacctacctacactcattccttaagacttcaacattcttgtgcccaaaggttctatctctctgctctggagatttgcattttaacaggaatcagagaattggagcccagatattctgcacacaacctgaacaaacaccctaggatgctttggagggttacaacaaactttcccagagcatacagctggacttcactttgtaataacttaagcagttattgtatatactacatcagcataaaaaatccataaaagcatcttttatctccccttctttttagcattaagtacagtagtaggcatatagtaggtcttcggcaggtgcagattagcaatagaataactacctattctcatttatgtttcgtattgtatttgtaaatatggtaaattgttcttttcttacaactctttaaatttggtgaatatataaggaataaggaacgtcaaaagaagcagtaacagagtggcaattgcaccatagtattctacagttggaagaccatttgccccatcattgccactctggttcttggacctctgagagtgcacccccaatgaagcacaccatttcctgcagcaggtcattctaccttatcattgtggaatgaacttctttgcttcaggcagaaaaggctccccaaaggaaaccagcctttggtcaatgtcacctttgcttctagacttcacacagttaatgatcacataccatcacgctctaccctcctcatttgctgggagttttccaagttctgtttctatctttctgactaccctttctgtcttcctttttgattctggtccttctgtataggggtcttctctggcctgctcttctggctctattcactttactagtatgtaattcactagtttatgtccaaatacccctgacatttaccagatccctataaagactgttatagctcctgaattttggacgcatatttccatctacctcggggcatctctgcccacatgtttccaggctcctaaaacttggctggggaaatgctaagctcatgttctatgtgacgccttccttttaggaaatatcactattttcctcttatataggctccttccaaacaggtaaatacctttataaggatactgtcagttatttgtgacaagtctcatacacacattaggaatccttttctagaacactagcataaattaacctgtactgaatatgcctgttgggtgttatgtgcccaagtttcaaaaggcatcctgccatgggaatatctgcttctcatgaggaggattaacgtgtgtgtatacaagccacagctaatgcataattaagatgttgattatttatcatgttttagctctaaaatctttatataattccccaaagcattacactgaaatgttctttccttaaaggctacgtattttaaaaatgccaaaaaagtgtcctaatcttatttgaaagctcttccgttgagatagcctttgccaagaacatattcttcaaataagatgtgctcttttagctgaagattacatttaggacaaaatatctagaaaaagttaatactttgtcaaggcaactttagaatttgagtaaccagtttctcctccttggggactcctgttcttgcctcagatatttctggtttcaaaacagggtgccaaggcagacctctcttctctgctgatttttgtgtgtgtgtgtgtgatactttcagaataagattatcctggaccccatgacgttcagcgaggccaggttccggccgtccctggaggagaggctggagagcatcatcagcggcgcagcgctgatggccgactcctcctgcacgcgagacgaccggcgcgagaggatcgtggcggagtgcaacgccgtgcggcaggcgctccaggacctgctcagcgagtacatgaataatgtaagtcttgggatctccattctcatgtcttggtggattctgttctgcaatcgtgttgctcttttggaagcatagatagcaggaaaagagaacagaccaggtgtttaccaaagagagtcaggtgaaaccaaagaactgctttgggagagcgcgtgtcgtgtgtgttgtttctgaatccattttttgtttgtttgttttaatatggaacaggtggatggagaataagctctttcactttttacttggctgatttcttctcggtcattttagtggctgcattttgaagtaggtaagatttcaattggtaaaggtagatgattgatggaaacagctgaggatatagtaagtcctctgttacaaagagcacttttaaacctaaggatagctgtagatgcgaatcttcacccctaagaggcattaataaatctactaggtttaaaaaacgtgtggatagggttgtttaaggaaaagttctaaatgtagtaaaatttggaggtgttttattgattcatagtcaggaattgcttataagagtgagtctcttaagttttcaaataggtatgtatgactggtatctaattgtattttggcacataatagccatcctctcctatagttgtaaaatgtgacagtttctgtgtacctgtaacctgcaagaaggtgatgaaactcatattctttgccttgaaaggcactaaattatggctgtattgatttgctacattcattcagcagaggcgatgcttgcaacagtggatgatctgtgcttccccctttcctggactttcgggtttgagataatttagcacaaattggggaaaaatgtagataaagtgaggtctcgatattacattttgaaggaatgccctgtatagctaccaggtgggtaacagagacactgaaaatctgctcacagctactgaagtccatgttaggtattattagaacaccccgaggcaatgctgaaacaaagcagccattcagtgtctctccctccagcatcttaccactcccatcatgagtaaaaatatgtagctaacagacatgcaagcaaggaatgagtgttgacagtagcagtgctcctcctgctgaccctccagagaactcactgagaaagcaaaaagatgtcaatgagaaaacctaacaaactaaaaaaaacaaaatttgtttcctttccatgaaccttcagattctttgattttggaagacttggcctttttcagcacacaaagaataaaatgtggatgcatcatgtggcacccagctgcttatgaggacgtctctataggaccctggatgaccaacactttctgtaattttgatccatggtattacgtagggtgcagctagaaatgttgaccccacagtctcccagctgagtgaatcttttgaatagcagatgtgtcaacgaagaatgcttatgaaatctgagacgctgtttgtttgttcgttgttgttgttaacaaaatagcaaagggctaattacatggatgtggaatttggttttacattaaggcacgctagtggttctattaatgaatagttactgccaaagaaggaagtagaaactacagagatcacagtgatggttaagatctcaatataaataaatcagacaaaaaagtatgttcttctaaatagaaatcacagaacgtgactaaataagagttgatcaacacgtgacatgtaattttcagtttggtgtctagaatcctgccaactagaagtttttctttcagtgtaatctcatgcagatcagcagagctgatggatttttgtattttattgactccaggcactttttgttttctgttcgcagcctcgtgatgcaggaatgttttgtgctttattgaaatcttagtttctattttgacatggttacagacaatacatcaatgggtatagtgcttaaatttcaaaatgcacaagttctattcacattgaaccatcatgatcaaagcctgaaataaaacacctcctacttgacatttatgtaaactgtataacatttagttggacttcacacttgtttggtgatttcaaggtagaattggatgcagccagatcaccttcataattcctgtccagtgcactcatttctcctgctgcacagtcaatttgtatttattttgatatagcatgtatgaatacaaaaacacatacacatccatgccctgactgaaaagtctattgtagttaacagcaaacagtaaatcagtctatcgttcctgggctgttatctttctctttcaatttcataagctctgagaataaaggtattatcaaatgatcaccttgcaagttttcatcctaatgtgctaggcagtaccattaggataaacaagttgttaaactgaaaatatttaaaaatcagcataactgacatttctgttttctaaaaatctcctcatcagtcccagatgaacattccacttacacaatgcttgcttgtggctgaagctgttctaaaattgtatacatgccaaattgtatgacacagagggagacagaggttgtggagagaagctgtgtatcacacctgatagaaaaagggtcttcatggagcatgggctatgacttagccacgtagcttccattgagctcaataggatagcagtcacatgttagatatttccacaaatgtgtattctacttaatgaacgtgggtgtgcaacttgaagatgtcaacagaattgtgcagttaaaagaagtggtgatatttgaaaaaaggctgggtgaacagaggcatggggtgaaaatcatcacagatcatggcggtggtagaaaggatggttggaattcttttaggaaagccttggctagacttaagttgctttatcaagttgaagatataatccaaagtgaaaagattcttaaaaaataatccccctttaagtaaactattattattgtacatatgtgaagactaatgggtagagagagacttaaaaggatgcgcggcctatagatgttaattgggatgagtgccgtcagtgtggtggttgaagtattatgctgagtactttaaatagttccaaattatagtgaacacataaaccttccttgggaacttataattttatgcagctttctttggtggcagtataaacataacattttatgggttttattaataagaatattgtgaggaatgcaaatttagaatattttattcattcaacaaatgtgtattgtctgctggccatttgtgccaggcattgctctaggcttctggggatacagaaagtaccagaacaggtaaaattctctgcttgctctcatgcagcttacactgttgtgggaggagacagacagtaaatactaagtgatatgagcaagagtcacttcagatagtgatatatgcaaagaggaagtctaaaacatgggagttagaggacgctgggtagtactgaagttaagaatggcctaggaaggtgcgttgaaaggatgacattagatcaaagacttctcagaagtgaggaagcaaagaggccttgaggaggaagggatgacaaggtcaagggccttgctgtgaatgggtgcctggtgcacccacccgtttgaagcaccatgggagtcacagcagctattgtgagtagaggggtagcaggagatggcgtctgtatggtgctgaggcatcagtcggtgcagggtgtggtgaaccattatacagaatttgactttcattctaatggaatgagaggccattgcacagtagtgagtgaaaaatgccatgattcaggtgctgagaacaggccacaaaggcaaaaggcgtaaaagcaggaggacaggtgaggaggccctgcgtcccgtaatattcatgagaggatggtctcttgggccaggggatagcaatagaagtggcataaagtattcaaatactgactataaataaaatttgcttataaattaactagtaagaagaatgtgtctgttttatgaacataaaatcaatatttgcattttggatgatttgcattttgaatgacagttgcagttgtatcaattgcagctcatatgatatcttcatttggttttggttgcacaggaaattctgatttacttgggtgttgaaagtagcttacttgggccgggcacggtggctcacgcctgtaatcccagcactttgggaggccgaggcgggcggatcacgaggtcaggagatcgagaccatcccggctaaaacggtgaaaccccgtctctactaaaaatacaaaaaattagccgggcgtagtggcgggcgcctgtggtcccagctactcgggaggctgaggcaggagaatggcgtgaacccgggaggcggagcttgcagtgagccgagatcccgccactgcactccagcctgggcgacagagcgagactccgtctcaaaaaaaaaaaaaaaaaaaaaaagaaagtagcttacttggcaatgcctggacactctgctagacagattgcatttgaaaggggagttaagtagaaaaattttgtttcaacgttgtatcaccaaaaatgtctaagtatggttcacattcttataaaagactagaaaaatttaatacttattctaagtattaaactgtaatgcagaactgtaaggagaaaaattactacttattctaggtactaaaactgtaaatgaagaacaataaggaaattcattaaactgttacttctttatgcacaattcatggttaggcctatgatgagaatatgcaatgagcagatgtgcctggtccttgttgtgtcttgtgctgctgtacaacctgtttcaattttatatgcataaactctctgtgtagctcgaattttttttaagactaatttagagctacagttttcttaaacaatcatgcagttaaactattttcaaatgatggcagagatcctggtggcataaagtaatgctgctgttctctgctgtaaaatatggtgagacatttttaattgtatttttaaaaataattacaattgtatatttttttaaattttggatccaactttttttcaagcctcttgaagcatctaagtggatccctggggttaacaatttataaaccattaatatatagaaggtattaaaagcacatgaagacatattgatatgggaacatatatacatattacaagtgtttgaagcattgtcatagcctttgttagagagtagaatttaacataaagtgggttcctgaaggagcccacttgtgaggatttgaggactaaaataggatctaaaaaggttatttccagcccggttttatggcctatacacagcaagcctccagcatgctgttccacaacactagatgagtaatacatgagatgatatccagggccacgagatctctaagaatgtggcttttacatttttgtatagtggaaaagaaatatatgttcactagaaagaacaaaaagacaaagaagaaaataaaacatctcatcccccaaaataactgctaataatttggtatgtgtctttccaatgtttctgagcatataggagtggtatatttacacacacacacaaacacacacacacacacacacacacattacactttgcttattttttataaaatggactcatattgtaaatgctgttttgcaatctattctctttactcaatatattgtgaatatgttaccatatcaataaacattctctaaccttatgtttactggctgcatagcattttattatatgaatatgtgataattcatttagaagcaattcattttgagtgtatttttagggaagagccttggaaaagataagtagggaaaacttttcctgctggcagtacagagttctgattttagacccaaagcgtgactaggaacaaaatgagaacgaagtgaggacacagctttacagtttctgtggttcaggggatccctgacaagtcttgtgcaatcggatttttgcatataaacaaaatttaagtgcctctgggattctatttgaaataatcttatgtttatttatattcattttctatataaatctgatttttatctatcagaatttatttaagttggctgtatattactgccgagagaggcccagaacaactagttggcaagttcagtatttgggtttgatctaaaatcccagagaaagatcgaaaccttccgaagggactgtcatcagaaagataactttgccataggaattgctatactgccacatttctcccatatgggaagcatgaaaaagactgagtagctcttattacttaagaataaggctcatcgttgattaaacatgaaatttgttttgagtattatctggatcttctcttttctctccttcctattattatgtagatgagggaatgcaactccctgaagtcagcttggctaataataactttctctattaaaaggtgtgacaacacaatatagaaagtaatgtttgaaaatgtttgtgggcaatcgagatcgaatgttgcccatacctttgcctaatggccctgcattctaacgcaaaattaagagctgcctaatgagattggtagcttcattcaaggggaagagtcctaatattctacattggtgcctgtggtgaggttttccttgcgtttttcttacttgtatcttttcttctctttcctgttctctttcttcactgtatgttcaatgccctcatctctattaattttgaacttcagattcctctgtgcatttacacttcccatgcaaaacttttgcttccttgaacagagttttctaattcttccccctcccctcccctcccctcccctcccctcccctcccctcccctcccctcccttctccttttttttttttttgacggaggagtctcgctgtatcacccatgctggagtacagtggtgcagtggcatgatctcggctagctgcaagctccacctcctgggttcaagcgattcccctgcctcagcctcgctagtagctgggacaacaggattctcctgcctcagcctcccgagtagctgggactacaggcacccaccaccacgcccagctaattttttgaattcttagtagagacggggtttcacccgtgttagcgaggatggtctcgatctcctgacctagtgatccgcccaacttggcctctcaaagtgctaggattacaggcttgagccgctgtgcccagctttttttgttttttgtttgtttgtttgttttgttttgttttttgagacggagtctggctctattgcccaggctagagagcagtggcgcgatcttagctcactgaaacctccgcctctcaggttcaagcaattctcagccttatttatttatttatttatttatttttttgagacggagtcttgctttgtggccaggctgtagtggagtggtgcgatctcggctcactgcaacttcagcctcccaggttcaagtgattttcctgcctcagcctgccgagtagctgggactacaggtgcctgccaccacgtccagctaattttttatttttagtagagacgggtttcagcatgttggccaggatggtcttgatctcttgatctcgtgatccgcctgccttggcctcccaaagtgctgggattacaggtgtgagccaccgtgcctggcctttaaatttgtttttaattggtatttcttgctcagatattgccagagtacagctatgttaccaatcctttctctgaggtgaaaaactatcctttgaatctactcctcaaaagaaatatacatagttggcacggaagtctttctgcccttgcaacatggcacttacaattctgtttggctgcatttctaggtagatttcactctaactcccagagaaactgggaaactggtagagggttttttttcttacttcctttttcttacattattatgatcatactccctttctaaaggtgctcaactgtgtttactgtaatgcgatcttagagagccaatggatgttgtgcagggatatgttggctggtgctgacccaggcacaggtggtgggagaatctccagtcatgctggcaggacatcttctctggtagaatcatgacagggagagtgtgagagcttgtgtcaggttcaggtgttgcccagagcatgtgtgcactggctttgaaaagttccaggaggagatctagactggcatgagggtgttctggatacagtacccatcagagctatggaacacagatgtaggtaacatccaggccctgtgggaacatggcaggtcttcttgggccttaatgtgcccaaggtatgggatgattattcaagtgggggacttaggtcctctgaaaagtatgacaactccaggagctccctgttgccttcattgcggtgaaaaaacagtattgaacaatcaatacttctatctcattcccccactcactgccctctaacccaacattttatctccttccttccctccctctttttcttccttccaactgtatgcctggtgaaatccttaaaaactcttttgaattcatgaatgaactcataggaatgtaagggcattactagaagaaaagaaatgacaagaaagtaattaactggagatgggcctgcagacttttcatggcctagacttgggttttaagtgaggcattaggtgcaaagaacaggacaaagaacattgattcaaagaacaaagcctgatgacccagctagatggccagctagattaggggcctcagcagaaagtctggattcccagttaatgaaaccattggggtttgatctaagaaagtaaaacttccatacagagagtaaaaatgggaatgtgtgctgtcttggcctttaaagagctataaaacaaaaacaccttatcctctaaaaatttctaaccacaagcccataatcactcagtatcagggccagaagctagattccagcatgacctaaagtttatccagaatgtattttaaaggcattttgggtggtgggttgccaggtacttggtagaagcaaatactaatgccttccagaggaacatactttaaacctggggctcaaaaaatttccaaagataaagttacaaagaacataagttgaccttccagaatccctaaaagcaaaacagaacaagccactgtgaatgagagttggcaataacaaccggttatggattagccctacagggtttcaagtttgcaattattaggtacagattataaaatatttcaaagaaattgaagagaatattggacatgtgatgaaggagcaggaggctgtcagcactgactgggcagacttggaaagcagggctgggagttgtggtgctagagggatatgggcttacttgaatgggtggggcaggcggttcttggccaagcctcctcttggtagccttctatgccacaagcctggacaaataaggaagaaggaaacatggtagctgagagtgtctggcctttgctgttcagagcggtgctgttggtaaactcttgactgggatctggtaatctcttagcaaccctgtggttgggtatcattcagcttatccatggcagacttctctaaatgaactcttcctggtaacagaatggaaaaagaaaatctgccaaatgaaagaggagatggaaataaaaatctgcctcaacagcaaaattaagttccgcacttagaactctagctagtttctctccttatcaaacaaactccttactgagcccttgaaaggtggttcggtcaataggatgaggaagagcaagtaatattatgagagaggaaagggctttctctgacttagtagctgagattgttgacagagctgacagccaagtcatcagatttggccagtctggacagcacatacctggacagcacaattgatcttctcggaagaggcttctggtatttcaaagaagacctcacaaaattgtcagggagagcagcaggctgcactccaccatcaaaatgatgaacctgggaaaaccttccctttgaattaacaaagtatgtaagaagatctgaacgctggatctctcgttcccgaatggcttgttccaaagataagctcccttgctggggcccctccttgctcaggttcaatgcggccttgaactctgagaggtatttttcttgattcagttcgaaaattgttacactctaagaactgagtgtttcactggttggtgatgtctctaacacctctccatgcttcaatcacaccaagtactttacagttaccatctctctgattaaaatgttatttccttttggaggccgaggtgggtggattacctgaggtcaggagttcgagaccagcctgactaacatggtgaaaccccgtctctacaaaaaatacaaaaaatagctgagtgtggtggcgcatgcctgtaatcccagctacttgggaggctgaggcaggagaattgcttgaacccaggaggcagaggtttcagtgagctgagattgtgtcactgcactccaacctaggcaatgagagtgaaactccatctcaaaaaaacaaaaacaaaaacaagtgttctttcataaactttgcatagatggctgcttctcctcccaccaagtttcagctcaaatatgttgctcttgactacattagtgcatttatttctactataacacttgccacactccaaaatcacatcatcttattgtttgtgttatcatctgctcctctgttggaatttactttccgtgaagagggatgttgtattgtttacaatccccagtatctggtgtatttggcctggcacataggaggctgcaaataaatattttttgaacaaataaatgaattccctttcatccccctcttctcctctaataataaagaaacaacataacctatgtgttttgagaactttcagtcacatagcttggaacccaatgattgatcttctttctctgctctactacctgataaaacactcagtgcattagctaaggttaactatgcttggcttcttcatgactcactatgcagtgcccaggcttttcactatagttaaagctttatttaaggccctgtcagaggccacatcaattctttcaagaaatggatagaatgatcccagtaactattagtagagataaaagtgatgcaaagcatgtcacttgcttgcttttcagttcaaagggctcccccaagctgctcactcttatttctgtcgctacagagtgacctgtttcggcatgagctcttaaggatgtgtctgagggcttggaggagctggaccatttttagttcacagcattctgcaggctggactggggactttggaaatttcttaactcatcacttcctaaaagacacaaaataatttgcatatgtacctgaagagatacatcgacagaagacaagggtcacagttaagctttttgaaagtaggtactgtgtttgcagagtcccagccccacctacagaataacagtctcctgctgagggggttttgatctctaaattgagcaagtaccccagctgattcttatgagcaggcatgttagggaacacctgatgtaataagtaagtgtatcaaatcaagagttgatttaatatagcacgggttaaaaacggggtttctttttgtgagtggggataaataactttgtaagaaatcatcaagtgaaatatctttcgggaagcctttttgggctatatattagtcagcctagacattcacaatatgagaggagactcgtgaagctggatagttaatctcttctttgaattccttagaaacagatgagcaaatcttcaccagcactttgccctgcgagatactaattgaagggtagttgtttttcaaaacttctaactttcacctcaccactctcaaacacacctcatcctactcatctacttttccatttataaaaggtcattttttatccttggaaggactgtactctcaaatgccagaaggagaatatcaagcctcatggattattcagaaattctctttcttaacagcttaattgctgacttcagtaatctattaactctgctggtttgaatgcagctgagagacttagagcatcaacccagagctatgccatttacaccttgaattgagctttcgttctaggttcttttggtgactattgtagggaacagcttctaagaggaaggagcattttgcccgactgctcctgcaattcttatatctgtgtatcaggacatgaggagatttttaaaaacacatattccaggttcctgccttggtcctaaatgataaaatctccagggaaagagctgggaaggtttattttagcaaatatcccagaggattctcctgcctccagtcctgcaccagccttggactatgccagtattgagaattatctgacgtaatcaacactggattcagagacaggtatcatacatttcctttttccgttttcttaatcacattttcacagtgttatttattgttatttctcttcactgtctaaattatcctccactactccttgccatggaactagtgaagacctttggaggccaatattttcttctttttccccctaaagtgactcaagaagacatcatttgcatattatgtaagtttcacctcaatagttttaaaaaaagacattggccttttttattattttgtctgcacacttgggtgttaggagggatcagtcctgtgatctggtgattaatttcacactattattcctgaaaaatagacagatacctcttcttccgtgtatcttatggatgtggtaaatgctgcacccatgagaaaattaaagagatgctgattctctgaccttctcttcttattacagacattgcctttttttttccaccgctgccctaattttaggcttctaatctcttctgttgccccttttcctcatctgtttattttcaaccacttgtaaaacctttaaaaccatatcagttttttacttttttttttttttttagttctttcaagattctggaaggatcaccacccattttcctaaaacctctgttttgtgatttcagattatttagatgaaaatgagtagcatgctatcttcaatgaaacaaatggttaaggacccgcccaaggtcacatgtttagatacaactaaaattggaactcaggtcttctcgtctctttattgccactctgtgattcttttcattactttgtgttatatattaatgaatctagagacaacattggattttcggtattctattctctccatttaaagccctacattgtgtagtgcccatcttttccctaatgtgtatattttgaatccctcagagttagttagatggtagactctggacaaatatccaatctgtaggtatctacagatcctagcagaaccctgccagcactccaaatagaaggcagacagcagcagccttgtgggatatttcttacagaggggcaaagaagagcctgttttgtcaggagtaggtgttaatgcagctaatgcagaaaatcgtatatttttcaagaatacagaattggcttcagtatctagttggagactgtcgatcatgtaagagacaatggtagaggcaacaaccatagcagccagcactagtatatctactttttcataattccataggggttcagtgcagtggctctgccctcagctagccatttctgtacagagatctgacttttgtttttttctgaaaataaacacctagttgcttgcaattttgagtaggagagaagatctggtggtctgcttttaataattaattaaattgacaagtaataattgtatatatttatggggtactatgtgatgtttggatatgtgtataaattctagaaagattacatcaaactaattaacatatcaatcaccttaccaacttaccatttgtttgtgtgatgagcaggtataaaatctcttttggcaactttgaaatataaaatacattattattaactattgtactgtgtaactatttcatgctgtgaaacggatcactaaaatgaattcctcctgtttaactgaaaagtaccctttgaccatcatctccccgtgtttcatccccctcgctgctcagcctttggaactgtttctctactctctgtttctatgggatccgcttttgtagattccacataaaattgagattgtatagtatttgtcattttgtgttggcaggaaagtaaattagtgcagctattttggaaaacagaatgaaagttctacaaaaaactaaaaatagaattaacatatgatccagcaatcccacttgtgggtatatattcaaagtaattgaaatcagtatgttgaaggcatctctgcactgccatgtttattgcagcattattcacaacagtcaagatgtggaagcaacccaagtgttcatgagtggatgaatggataaagaaaatgtgatgtatacatacaatggaatactattcagtctttaaaaaaaaggaaattctgtcatttttggcaatggggatgaacctggaggtgtaactgctttttaaatagagtttcaaggaatcatcttttttaaaacctcacctttctcttttctttattccaggagaagctgatgtctcaaatttctacatctttggggttttgcagtataaattgtgttgttctgagcttccccattgctggcttaggatttggctttctctggcctgctaaacaggctagtacacctctttctgaaatccagctttcagaatactactgctgtttgcttctgttgtctttgtccttagaattaatgtctttaaaaggaaatggcttatatgataattttaatggaatttcagaaaagagcagtgataaatatgtgtgttaaatcaatcagccatcttcagccacaccttgcttttgtttttaagcaaggttttagatttcttccatcgctacgttcaggggctataactagacatagggatggttgttttgtaccctaacttgaccaaggggttgaatcaagataaaatgatcaaagtgcattattcaaagtgagttgagattttgggataaaagtagaggtgagataaaatgtgttggaataaagcttagttggaggatctatttgatctaggcactctgttgtatttgattgtctatctcattcctaatgacagcattatagatacttgttcctgtttagaggttgaagaaagtgtggttgtgaataccttgtctttgttgttcatgtaacgtaactatagaaatcgggcatttatcacatgatgataattctttagaaactttgtttcagagtctgttgaatgctacattccccttagtggctgataacagtcgcacaagtgatatcacaatatgatccatagcacagtgttaaaggataatcgagtccaatgttattatctcaaccattttataattttaagtatctctcccagtatatttagaaccacaagatccttgtaaatggattattcccatttatttgttgcatttatttgtttactaaaggttacatttatcttttgtacgattgctgttttttcctctgtaatattattttacatattagtcttgaacttatgtctttttaatccttagaacttttattaggtatgtgacccaatgatttgatttataaacatgcacattgatatttctaacaattcatatttttatataaagtgtatactcacctgccagaaacagtgacaagagaaatatacatgaaatatttaaattcaggacaaccattagggaagttcttgtgatatattcctaatgtattgtgattattagcattccttaaaatttccctaaaaatttaacacccattcaccaaataattcttactaatgaaaggattatttactagcaaatcacatatagtttgacacatctatatgtttaaaggataagaaaaagcaaaatttgttttgcttttaatttagttaatttattagttttgatgctgcatttcatggagccttaggtgcttccgggtccccattagtaagtgaccaggagagaggaatgagtgtgactcttagttccctctgtcccccagatctgtttttccctgagaatccctgacactaattgaattcaatatttggtttttatgtaaaattgtatttggaaaaaaaccagatcctgtttttaagacagatttttaaaataatggcattctttgtttatacatctaagactttttttttttctgaaatacccagataattgacagggaagttaattgggagatatgaattatttagattttcggccaatctgtgataatactcatggatctgaagattacgatagaatagagaagcccagctctttgcagatagcagacctatcctgaaatatccaaatgaattcacaaattatgagcttcttatcactgtttggctatcaagttatactggctgtataaaatctcttcgaattaatgagaatggttctggccccctcttcacgcctaacctaagtttctcagcagttcctggttaaatattctactccacagggtttccttcattattccccagtgactctatgccataccttccaggtgaagaatagcatgctgtcttatagagtacgatactagaactcttggcatgcatcattttcaccatgttctttagaaagtgtcaggatttttagtttttagaagaatatagatgtaatattttgcagcatacataagttataatattccaaaacatcccgtaagaccttttatttatttcctttattgtgaagcatgttctttcctgatagctacagatgaactggaggccttttcttatcctgtaatgaaacattgaattatacccatacagtttagcagaacgaatgcttacccactggctgaataaatcaggctgttcatattttctttaacacaaaaaggaaatgataattaatgaacttgaggataaggttttaaatgtgtatagttattatagtataacagtgctgcgggggctacttgctgacaagggtaagggcaattttatttccttataaataaaatttagaattgaacatctaaaacaggaaaaaaaattaagagtttattgagtgttatgttttgggagttatactagatacaacagtattaaataatatgcaatagaatgagagacttattgtgcaggtcttaaatgttgtaagcctattaagtcccttccaaataataaagacaaatgcatatcaagatagaaataggtagatatgagttaggttttcagagagagagctgggttgagatactgaattattcatgacagaagtagagcttgaaatatttgaaaggtgtacagcaataagagaaatcaaagatggagagtatactttggggctagggatgacataaagcaaaatttgttataggaatgtgtatggtacattctgagcacagtgaagcctgcttgattagattaaaggacatcgaatagagaaaaaatatgtttgcaaaggaaagttgagattaagttgcagagggataggattctaaattaagaaatgcatgctttattatggtaggcagttattaaatttttatttgttttggtttgatttgttttggttgggcttggtgttatcatgatcatattaggtaatatatgcagtgtttgggaacagctatcctgcctgcagaggtggagagtggctcttgagagtgtccatgggagataagaggccatagagacctactagtggacttttaggaaagtacagatggaagacaatggagtctgaactacagagaagacagtgggaatgaaaaggagaaaaacagattcaaggagaataactaaaataacctgaagatggattttttttcaacaagaagatagatgggagaaggaaccaaaatattgcctttctcttttcatgagatgtatttatcaattattcattgaactcacatgtcagctaagttagggctgatcaaattcattgacaatattttttgaagaaaagcatttaacagtgtttaaaatctgtcatatattaggttttgatcatataatgttactctgtaaatatttgtcttcacctgttgcttattgtattcacacagtagactattagtgcttttgatttaatcattatgctatcaaaactcatagtatgaagcatgttgcagttctgctgaggcctgggtttgggtctcacattccagggtctctttgaaggctctgatatcatggcctagtggacaggccagtatctgcctctttggtggtcatttttggctcaatatatggagcataataacttccaggttgttattttaaaagttaaaaaaaaattatttctttgtgggaaaaaggttggccttatagaagatactcatgtttacgttgggtttgttgaatcttaaggggtcatttagctttcacaggtattctttaattgtaccttttaaattgtgtgttagagaaggattgtgagcattaaatttcattaatacctcaggatacaccccttaagaagctcaaggatcttgtctaagtgtgatctgttacctggagccttcctttaggttgttctctgtcctatggcagctgtggttttaattgtcatgcactttgttgacttacatcgggtagtatttctattattcaactgtgttcaaatatttatttggtatccattttatacaaaacactattgtagatactttggaacaggaaaaaattgaataagtgagccactgactgtaccttcaaggaaattataccttgtagtgtccagaaatatactattctattcattatttctgatttgaaataactacattttgaacattgtggtcgttcaggttgttcatgacatgatagagaatagggtattttgttgattaagatgaatctgagtcagatgaaatttgatacattattatccaagaaataaactattacctaccactggaaaaccaatgtgtctgcccaatttccaatcagcctgaagccagtttcattttgcatgggtgatacagatgatagaggtggatcatccagcagcttcatgtatattcatacttatcagatagggtcaacgcctcttagtttggtttgaaatctcactgggaaatgtacttcttcctttgatagatttatcaggtgatatagtccaaccattcctgaaacaatacatgaaaaaaaatgttaatagttacctattaactataaatataactaaaaatagttaatagttaatactgaccttgaggtatatattgtctgtttcataataacaacaggcaaaattgcaaaacacattattaaagggatgatttgtgggttcatagattaagtatctgtaaataccacagccctacatgtgtttactaaatacaagccatgtaaggataaccttcctttgacagggagatgtgacagggactggggctccagcaaagactttccacgtttttaatgtctttctgggtagctttaggggcattttggtggattagcaactgaatatatcatttcatccaaaagtaggtagtaaattaattccagggggaaatttatagtagtaattttcagagagtaaccagacaggtaggtactcaaaattgcaagattcaaggaatcagagatgttttgattagaaaaagatagtgagaggagaataactgccttcaaatatttaaagaactcttttgtaaaagaaaaaaagggacgtattccgaaactgtatgtatgaccacagggaaatatttaggctcaatagaaagcaaaaactttagaatagccagagctctccaacaaattctatcatctgaagcactctgagctgcctcaaaggctagtgagttctctctcactggattgtgtgttgtgagcatttagcaggaatgctgtaactagaaattaaaacatgaggctgaactttaaggtttctcctttccctgacattatcactttcataattttctagacatgcatctgttggttgtaggatggccccatcatcgaggaaattcttcattccttgtattctacttgtctagttttctttggtccattttatacaagaagctggtttgaaaaatgagagggaagtttgggcttttagatgatcaggctggaaatgataatcagttccatattgcttattcatcagttcttgacggaaaaattttgcagtttacctagtgtctggctgagtaggtcatttacacagaaagaacctggctatgatttagcaaagatgaggatagttcttccatatcataaaaagtaatctgggttcctggccagccgtggtggcaaatgcctgtaatcccagcactttgagaggctaaggtggacagatcacctgaggttggaagtttgagactagcctggccaacgtggcaaaaccccatctctactaaaaatacaaaaattagccgggtgtggtggtgcgcacctgtagtcccagcttcttgggaggctgaggcatgagaatcacttgaacctgggaggcagaggtggaggttgcagtgagccaagatcatgccattgcactgtagcctgggtgacagagcgagactctgtctcaaagaaagaaagaaagaaagaaagaaagaaagaaagagagagagagagaaagagaaagaaagaaagaaagaaagaaagaaagaaagaaagaaagaaagaaagaaagaaagaaagaatgaacacgggttctagccacctcctccctcacttcagaggactctttgacataacctttgtagagcaaccttaggttctcttatatttgcctttgttcctggagacagtaaaggcaaccaggccttggtgcaactggtggagaatgaaacttttgcgaaataaggattgcattatgatgcctggacgtccattttggatttctgcaatgtactttgaatctggctacccactatagacttcctggatgcccagatcttctgactgtcaattaatgataatgattctgggcaagttttctccaaaggctaaactggaagttatattttctgatgttgctgccagaaaatcaattctattctatgaagtcattcctaatgtgagtccattcctctagggaggtcaactctagtatgatttctttaagcatcaaattaatattttacttcttaaaatgcaaagtatgtttctgttgaaggtacagttaggcaggtctttggaatatccctggcttgttaagaattttctctgcagcaagtattactcaacagtatgaagcagattttagagcttgctttctggcagagcaattggacttggaatttgcctctttattcaacctgtatttgacttgacttgttaactgtaaaaataatatatgattttttttatatctggtgattttgattagacaatttttaaattatgaaatttcatgggataattttaatccattaaactcttcagtatgcagaatttcaatccattaaactctgcaatatgcattaatatcctgcacaatgcaactgttcactgtgtatgtgttaactagtggttaaaagaccttgtatgttattgactcaccaataagttgtagttttatatcatttaaattcatcttgtctttttaattatatttatctatgaatatcggatatgttttaaaatgcaaaatttaattatgaagaatgggtttcttttgtttttctttttctcccctatacccactcccctttaccccattatcccagcccttattaaccaccattctattctatgcttctgtgacttttttagattccacatataagtgaggtcatggaggagaatgcatttcttaattgatttgtacccatggtcctcaaagtgtgatgtgaggactagcactagtctgtaagctatttgttactagtcttcaacaagatatgtacaataattgtcagcatttagaaacttttgtagtaattttgcatttcctcaacaatggcacagaattttacaaaggttgatcagttctcaatggactggaagtttgtttttttaactacttttcatcccagatagtctgggaagcctcgtttcacctttcagttggtagtaccctaaaaggggagagaggcagacaaccacaaaaatacaagcagatgtttgcaaaggcaatacaggcaagcaagttcagcttaatgctatacaaggctcctaatccaaacatgggaatccagggatttgtggatcctggagaggtcacctactctcagaatctctctctccttacccagtcttactgccccaaatccccagcactagctttttagacaaaaacagttgcgtatggaaggtactgtttaaaatgcatgcggtcagcaactgcccattgagcctctctcacaccttcagattctttgatgaggttggcttacaaagctcaggaccgaggtacattctgatccaatggatttctgtggggacgagcctcacccacctggggctgagtggagcaactcttactgttgtacacccagactgcagaacctgagccctaaaggctatggggacctgcccttcctccccacactctacctccagagccctccctttctctgaaaaaacaatgctttattatagttatacaggatggaaaagaagaatgatgagaggaaagagaagaaacagataaaagggaaagaggagcaggggagaaagctaactgtgtgatggagaagagggaaccagtgaacttgggatttgagagtatgtgaaatcatagtttaaaacctttaaggttttgtcttttaactccggccacctctcagccacctatgctgagatacttgtgtgtgagattctttttttttttttctttttttggtgttttcttaatgctagatcaatgaaaatactgtttcagcttgaatttatgatgtaagtgagccagttattgaagtaagcttgctgtgtgtacaccatgaactactcaatttacaatatgaaaataattcccaatattaagtgtaaataaagtatgatttacattttatgtaactgctagtttatgagtactcaagactttgtacattttaacaaggcctatttttaattgaatattgaaaaactagatcctcaaacttttcatcacatacattgagttacaaacttgacaaaccaccccatcttcttccttgcatttttaccaccacactttgtatttcatgccgtggtcatgacaggcacctgttgatacccagaaaaagaactttgaatgtgtctactgtaatagtgtgcattgatcctgttgatccctgtgatctttgaagtgtgtgtttcaccagtcattaatttattttgtctgtacgtacgtcattttaggtcagctctctgttgtcaatatttctagcatatatatttgattagctctaagtggagatttttgtttgtggatatcttggacaattatagttatcatttcatgctttatagggtttttgttttctgtgttaacatcaccactaccaccataatcacaatggtatttattgagcaacctctgtgtaaattgggtagacattttctcttaggtcatagattcatgggtttaatataaaaaaggggcgggcagaggaagcttatatttattggatatttattgtgtacccaccatgttacgggctatcatattgaacctttctaacaacactgttcggctaggatttgtatcttcattttttaaatgagaaaattgaatctcacagagttaagctactagacctagtgaaacaaagaggctgaaattcaaatctagatctttgggcttctggtattctcttttttttttttttgagatggagtcttcctctgtcgcccaggctggagtacaatggcaagatctcggctcactgcaacctctgcgtcccgggttcatgccattctcctgcctcagcctccctagtagccaggattacaggcacctgccaccacacctgactaatttttgtatttttagtagagacggggtttcaccatgttggccaggctggtctcgaactcctgacctcaggtgatccacctgcctcggcctcccaaagtgctgggattacaggcatgagccatcgcacccagccctggaattactattctttacatggtctaaccacctgtatgcttttaagcacacttaaaatgtttctgtgcttcatttacctgcattaatgctttgtgtggttttagttttttaacattttttgaatagttgtgacagcttgatcacatctccagataacattgcatatggagcatttaaagatcagtaataaatataaaatttaaggaagttccatgaggtaatagaaaccattccaaaatgaaaacagaagaggtctatgttttaggttcaggtcggcactaagctgtaactataaactttgaatattttatttatgtataaaatgagaaagcagagatacataatttctaaggttgagctttaaaattatatgcctatatggtctgaaaaacattcttgaactattttaattttgcctatcatccaaatacattttaaaaagaaattctattttctctgactttgtgtttgaattaagaagatgaaaatcaatttggcctgattacagaacttaactatattaggctggtgcaaaagtaactgtaaaaacagcaattacttttgcaccaatctaataatatcagcaacagccaaacactaatagcaataataatttgcctacttttaaaatcatgtgttatctttaactgtgcaactctacaaaattgttgagtggttgttcccatttcacagataaataaattgaggctcaaataagtcaatatgattggggtcagaagagctactacaggtgggacttgagtttacactcagctttccttgtattctaagcccattgtccttacatcattccaaaggcaagtcccagcccagaagtctttgagcatcccaagtagggagggtatgtggcttaagggactggttgcctcttctgtgatgaaagctgtgtccttgctctgcagctcaggattagacactaccagatgtgatatacagaggggaacaaggtgagctcttcctcatttccccccaaaaaagacatgggaccctttggtgtaatgaaagaacctagcccaatggcttaaatcctattttatgttacaaatgtaggtagcattactgaaaagagatagatttagaataaatgcaccaaggttttactttcaaagataagtagaagtttgaatgagtttgctaagaggaattttagaatggatgtataaatagggctcaatagttatttggatgagattgcagttgcatagatccttaacaagttatacagttaaagttggtatatttttttgatgtttgccagagagggggagcagagttagcattatctccttgacggacacccatcttcctccctaatgaataataacaacaatgaaaataatgactacattactgacaggctattctctgccagccgtggtgttaggtgctttgcacttattacttcttttgattctgctgacagccatactagggaagaacactattgtctttgttttatagatgagggggcagagcctccaaaaaattaaatgccttgtccaaagtcacatggaggcaaaaccacaatttagactggtctgcccagagcccgtatttcttctttctctctctctctttttttttttttaactttttatttggaaataattttaaatttacaaaaagttgcagaaaagtacaaagaacgatatatgctttactcagatttgcctgttaacattttgccctatttttgaccccacactctcctgttacactgcagcctcacaaagagaggctatcatttatttttagtgccctggatttagttgatctcatgatcagcccagtctggctcaccttgttcaatgctctagtgaaattctacatttcaaatatctttgaaatagaagaattggtgtcacattgtagttatacgaagactatacatgagatgaatgcataaatctaactggggtggagaaatgactaccttttacaaattgtccctctaaaacgttttggggtttgctgattattttcgaaagaatgttgacagaggcctggcagtaataaataatacaccttgtgttatttttccttgcagagatttcctttttgagtggcatttttttccctttttaggtttatttacccagttgttgaaatcaaaattaaatgcaagtcacagttctttggactgtcaaaggacatgaccagaagagggcagacttgcatgctgcaaccgtttcccgtgtaattgagcaatctgcatgctgatgttatagaatggcaatgaagagagatttaataataactaaaatgaaaggcttatgcttatttggtacaggatttctaataagacatcagagtcaaagaggcttaaaagaacaatgtgctctatttagtgtattctaaatgtgaagaaaaccatattcgtttgattctattttttttttctttctgaggcagtactcgtttcctcagtatttctgagtttgtttttttttattttttttctcatgctgggattttttttttttctctgtagtcacccagagaattttcagtggtgaatgcttttgaatgccttataaaggtacaaagtttatctacagtttacggtattatttaattgtcatacctgtgaaaggaggaatggtgaaaatcccttatttatgcctctacttcctgaatgtgccctgtgggaacagagttacagacaacccgacccccttttcctcctcttggctcttgcctgcaaccggcatcctctggcccttcgagtgccaccatctagtggctgtttctggaaactccaagcgtccttttttttttttcctagcatctttcaacccacctcagttgtagacaggcttaattaaagttgtctaaggaagcttctttcttttggatactggcataaccattttccttaccttaagccatcgttcctcaccttaatccatcttgcctcattatattagagaagtttcacagtctttccaggggtagaggtctaaaatttatacacttgggagactctagttaaaaataatacaaaatcatgaataaacattagataccaggatttagaggaggcctgtgcagatgaagagtcttgaagcttgaagtctcttagatttttctcttatctcctccccacactcacctttctttcgttttctgtcatgttacatgacctaagtaagccgcgaaagagccacttttcttatcctgtttgctaagtattgatgtgaaggtagtttccattgttttgtgatgaaattacacatagaaaataatgccattgacctccagatgtctttttatgacctcttcctcccttcttattaaatattcttcccaatggaaaacaaatattcataaaaattacatagaggtttcttattcaatttcttgtcatttctacttaattgtcaacatcataatagtatttggtagtgctttgctttaaacatcaatttttgtttcaaatgtaagccagttgacttacattctaagttagggttttctggcctggctggaagaactaacagccacatatagcacttttataaaggaaactactatcagtgttacaaacaacaaatttagaaatgaaatttgagaaaacaacctgctcataagatggggccagtctacgtgacgtggaagacaatccatcgtttcacttagcattctgcatgtagtgtctgcaatcttcaggctatgtcttcactcatgatttcttgacatatctgcacatacccctcattatttcatatttctctaaattttctcacttttcaaatcatctgtatttacaaggctaatggtatattactatgccttcaaaggaacattagtatcatttgtcataattagaagataaccacagaaaaaaatacaatgacatgaaaatgaaattaaatattaagaagatactgaagccggccaagggccctgttccctctattaaaaaggaagattagaacaggctggagaggcttaaagtaaaagaaatgaagactgtattctaaagctaatcagaagactgaaaagacaattaaaagaggactacatttctttctaagtaattctgtggtgcttaatgtcccatcctggttctatttaaaatagtctttgagaaacactgatgaagaaagtttttgtttttactcttgtagacattccacatgcctttcgagattcattctattgaccttttagagggtgggattaatcatgatgtgttgaggcagacatgttttttaaactctatgttactcagatttgattggtatgacaccaacttcccatggctattttaactgttaaattagaaaacacatggaaaaaagcctagaacagtggttttccctcaaaaatggcagtgccctcaaatctgctcccatctcccaaccaaggaggagctgagaagtaagggaggaggggagaaccagctcactgtcgcctatttcattgtgtaaagcaaatgagccctttgtttttatagatatgtaataatatgaataaacatatacattgtagagcttgatttgtagaacagaatttggatcctcattatatgattttttcacagtttcagaaaatggagtatcagaaacagtgatgaagatgtatttggattgacagtctaattaaagatatttctcagtgtaacatttatacatatgagtagattcacaatttggaagattttaagacactttcctgtatgtgtgtgtgtgcttatgtgtgttggagggatttgtagctgtcagaaaatattattatccaacatttttagagagtgaaccgaattgtaagaacagcgagcgatctgttcgcattatgcacttaaattatgactaaaatcacaggcataaaatcagagtatgcactttttgcataaagacaaagcatttgttcttcaaatgagatggaggtggctccaaagagatagccatggctttaaatggcacttgccaattttttttaaaagtattatctagaacactttagggcacaatgtgtagtaatgtagttactacaaggctgtttgattcattgccaaatagtactcagaattcagagatcagataaattagattttaattgggttttaaagctaagatgaataggtagataaggtagaattggtcaaaaacatactaatgtaataaaacctttggttctctaaggctcttgcattaaagaccaggcagctatcactgacagacaatgccatggagtggtcctgaaagatcgatattaacaggtggagtgtgcactgggttccaacataatcatgttacctggagccatggaaaaacagaggcctgacttgaactctccgttatattatagaattttgaacacaaaatgaaatggagttttaccagcctgataggactctcaaacacagagtttattattgttttgttagcaattttaaaaaaaatattcaaggcacagcaccaagttgtttatgtctgagtgtgttgagtgcctgattgtgtagacatgggtagctgaagtagcttgtagcatctgactccaaattgagacttgtgactttttagacttaactttctgtgtaagtctgttattttccatccgtctgtccattaccgcagtatttacctgtttacattggaataaatatattcaaatgactgttattttacaatgtttataaaatacatacactgaactcattttgttttctgcagtcttaaaatgagttttttttccttaatatttagagatcttttgttaaaaaagctatagaaatcttttgttactttctctcccaaaatgctgtttcctttgggaattttatttttattttagttgtttgttttccttgtttgtaatatcctatttttttattctacaattagccattttgtcaataaactcaattagaaaactcttagaactaaaagtttagcaataagtctagatacatgtaaacatcaatgaatgatcttacatattagcaataatcaattagaaaatataaagaaataaaattcctactcacagaattgtgaaaccatgattttcttaaaaacacatggacccggctgggcatggtgactcatgcctgtaatcccagcactttgggaggccgaggtgggcagatcacctgacgtcgggagttcgagaccagcctgaccaacagggagaaatcccgtctctactaaaaatacaaaattagctgggcgtggtggcatatgcctgcagtctcagctacttgggaggctgaggcaggagaattgcttgaacctgggaggcagaggttgtggtgagccgagattgcaccattccgtctcaaacaaaaccaaaccaaaccaaaaccaaaacaaacaaaaacccacatggaccctactaatttgcctaaaatatttttaagaaaagtcaatatagaatcttttctttttataaattagatagtgttagaatatactttgtattgttttagtatttaggagcaggagcttataaaatccaagaacaaatttatttaccaagaaaataaagaagaaagtgaaaagacaagcttttaaagaaattttctacagattttctgaaattttctgatggaaaggttttgttttgttgtgtttttaaagataattgcaaaatgcttattatacatgtgaaattgcagataaataccgatttgatctttggcattattttttgcttggggaatactcattgctgctattataaatctttcaccccatcctcacttcttctatccctgtgcttcctctgcctagcaacctgaaaaaagcaagccttctagcaggcagcagatgaaggttgccatgaaaactgtgaatcagtcaggacccaggcatccatgtgtgtggggagctgtcagcaacctctctttctgatgttgtgcctttttcctctggcacatttctgttggtgtgctcaaggggtctgtagtgcaaatgcaacctgtggaccatcatagcttagcctagcctaccttaaatgtgttcggcacacttacagtagcctatgggtgggcaaaataatctaatacagagcctattttataacaaaatgttaaatatctcatgtaatttattgaatatcgcatgaaaagagaaacagaatggttgtatggctactcaaaaatcgatttctactgaatgcatattgctttctcaccatcaaaatgttgaaaaattctaagttgaaccattgtaagtcgaggaccatgcatactgctttatcccaaaagagtgatctttatagcatgaatttcagaagccacaagaagcctactgagggactggtagtcttgagcttctgcatttctaatcagctttgtggctgccaggtccagcttatgtggattctgcagatcccagcattgctctcgtgtttgacttttattcccatgttcttttgcaccattattgaaaaattgacatcctcaactttgccagcctgtttctcagcaatagcttttatttccctatagcctatatttgaatgttaacctttcaatgtggtcttatactcatttattttgactggcctgtccttaactctactatttcaggacagattgcatcaatctggactctggccactccctctcttattcctgtactgctccagttatgcagagtgctccagcagcaaccattctggtgttccgggccgttgattgcattctgagaccttgtcatgggacacctagagtgctacttgatgataaacatgatgcattaatctcactaatggtattgccccacaagtagcaggaatccccactgagttagatttctataggtgggctagcagtgagtgctggatgatatcagtctttaaaccacacgattgtagaacaaagacagaaaacttattttttcttttttcctaaaatggagtctcactctgccacccaggctgaagtgcagtgacaagatctcggctcactgcaacctccacctcccaagttcaagtgattctcctgtgtcagcctcctaagtagctgggattacaggcatctaccaccatgccgggctaatttttgtatttgcagtagaggtggggtgtcaccatgttggccaggctgatcttaaactcctgacctcaagtgatctccttccctcagcctcccaaaatgctgggattacaggtgtgagccactgcgcccagctcagaaaactattttttaaaggatctgtagaaattcttaaagatcctacaatccaaattctcatattgtaattaattataataataacaaccataacatcatgttggcataaggtctaagcataagtcgtttatggcataagctccaggcataagtgctttctatcaactggctcatttaatcatcaccccaacaggatggggagaaaccattattaatcaaatcttacaggtgagggcactgagcattagagagggtcactatcttgcccaggaccttgcagccagcaagtgcctatgccaggaatcaggtccatgcagactgactctagatggctggacagaccaggaagccgagaaccaggaaggcagtggtttgctcaaagccacacatctggtagatggcagagatgatcaggttaccaggtccatggctcccagaccagtatatggctgcccatcatgcctctcttggtgatattttagattctgttttgataagaggttgttctcagtcatcatttgtaggagacacgaagaaaacaaaagggaaaacattattgtaataggtagcactgaaagcagcagaaataaaatatagcgagccctgaatcctaaaagtttggctctaccaggccaggtactctgatggtaggaacagtgtgccaaatgaggaggtcttgccaataatattctgataatgtctaccatttattgttcttatacactaaaggacaacttacccaagaggcacagttaccaacccaagaggcatacttgccatatccccagtaagtggtggagttgggattaattaggacccctatctgtctggcaacacatctcttttgtgttctacaaaaattttcctgcatcctatccttgcatgcaggaaaattatatgagatgaaatgtagaaatgaaaaaccctgcatggactggtccacttgacacattgacaacaagaagttccatttatgaatgttagtcttcattgaatcctaatttaagagaagtcagctgagcatggtggcttatgcctgtaatcccagcgctttgagaggccgaggtgggtggatcacctgaggtcagaagttcaagaccattctggccaatgtgttgaaaccccatctctgctaaaaataaaaaaattagctgggcattgtggcacgtgcctgtaatcccagctactcggtaggctgaagccagagaatcgcttgaacctgggaggtggaggttgcagtgagccgaaatcacgcaattgtattccagcctgggcaacaaaagcgagcgggggtggggcagggggaagtcattcagaacacttagttcataaaacaactttgcagaagagaaagttaaaaagaaagtggattttctagcaaactcaccccagaagaggggaatcggttaagaattagattcagttactattggagacccaaataccaaatactaaaaagatgagtgtttgtatatcatgtagaaaaaaaagaagtccagagacaaacatggtcctggtgactctgagtatcatcagtatctaggttccttctatgtttcagcactgacatccatagtgctgactccattctcaaggttgtctcatagacctaggttcagacttcttatccccattccagacaggaaaagcaagaggacacttgccagctcagcacttgccttttaaagttttcccaaagcaccatgtaacttcctctctgctcattgccagttcttttccataaagaaagctggaaatatagagaggtgtagtatttttacctgggtacattgttacctccaaaaatataaaggctttataaataaaagagtgcttgaaaatgaacattgtttaagcaaatgatagcctttgccacaaggcatgggaagatcctaaacagtgtccaaaaattaacagtaaccaaaattgataattctgccataattaatctataatatgcttaaagatatgcaataaaatatataatcataatgtgttagttctagtataatccatgtagatataatatacttaaggatgggagattcttgagaatgagttcacccattaattaatatgccaatttttcttcccttgtgtctgtttctaaatgagaatgctgcagcctgaaattgcctaaaataaaagaaacaaataacttacagggaaattaacaaaggaggattctgaaataatctcattcacagtcattatttattgaaagcctattacgtgccatgcattgggctaggtactgggggatgggagggtgggaactaggcaagcacagactttaaaacctgcacagtctaatcatttaattaaaaaaccttaccctaacaccttgaaacaacccactagatgtagccagtgtttttggatgaaaatgttttgtttcctttaagttgtaaaaactaggagctatatactttattaattcagtaaacaagtcatatatgtacccaactttaaagtgatgactcagatattcagaaaaaaagtttggacttctaggagtttactcaaacacaatgtctgtcctttcacttatacctcagtgaactgtcaaatggtcacataggccactatgtcactccagtataatggggactacaaatactggggcatggtacagaaatcagtgaccacaaagtacagtgcagtgtggagcggggtgggggtagggacctggaaatctaagcttgaaagtgattgcaacaaaagttttagcataaggagatccatgagtacatctttgaaatataccaacatctaagcacatgaggagaatcctggagtagaagggtgaaacacttcaaattatattcattaatcataagaaactgtcatattcaataagtagagaaggagaaaaagggctcacacagtgtcctccatacacaatgacagcattgttttaaacatttcattaagcctgttaaggttcattaaagacagtttatgaacacatgtttcatataagttccttgtatttcatgtatcaacatttgtttgcaggaatatacattgccattctcagaagggcaaaaatgagagtacttaatgttttcatttaccttttctcataaataagtttattgtttggttgttgttttttgttttgttttgttttgtcttttgagacagggtctcattctgtcacccaggctggagtgcagtggcaccaccttggctcactgcagctttgacctgctgggttcaagcagtccttccacttcagtctcccaagtagctgggattacaggcatgcaccaccacacctggataattttttatttttgtagagacagggtctcgctatgttgcccaggctggtcttacattcctgggctcaagcaatcctcccgccttgacctcccaaagtgctggggtaacaggagtgagccactgtgctttgccgttatttgtttttttaaattatttgaatcttaaaggtaataatactccttgtattggaatatataaaattaattagggcagaaaaagactactatatctcatcactcaaacacaactacttttaacattcgatgtaaatatttccattatttttctatgcaaaggttttaatattcttttcctacctagttagcatcctgtgcgttcattgaccaatgtgtttaattctctcctttttaatagacatgaccatttaactgtctatttgaaatcagcaaagcactaggtttttgacttattggttaaattatatccatttacttctgtatctgccatatgtcaaatatcatgcttagtcctggagatgaatagtaaaataagtcacaagccatatcctctgagattctagagaaattaatttatccagcagacatttagttcagtatccattatgtcctcataaagtacggggcaccaagaatccaatggtcaagacggtctattaggggaggctcccaagtgcttcagtgttcattttattgtgtcatgcttgctaagacagagctgcacacacggtgctatgggagcagaaaacatggggtaactaaattagacctagtgaattaggggtgaaataattcaaggagaaggtaatagtttggctaatttttgaaggagttacatgaaaaggtaagaaagaatattctaggcagaaggaagtacatggcaaaagaaggaaattaaaagataatacctcattagagtggtcagagccccctgcatccatcaagtctaatgctctcccctcccaggggagagaactgaggcccagagaggttaatgtgctcaacatcaaataactaatgaaagccaaaatgggaactagagccatgtctcttgactctatcctatcagactgggagctgttgccaggaacaaaggctaaattaagcctccttattccgtttcatatttaacactaagtgagaggaatgatctatacttcacaatgatagaaatatttggagaccctttggctcaccatgttaattacactgagaactgaactgagagtctattactttaaaccgaacactgagtcattactttgccccatgaaggagatttttcaagtggtatttttcttaaggttgaatatcgaagtatatatctaaatgatataaatagaaatgtctggtgtagtccaatattaaacacagcaaaatttcaattagccaaataaaaatttcacagccctccattataatttaatcttgcttttcctttcagagaggaaatcatatgaaagaggtgtgttatcagacaacaagctgaagatatgtcaggcactgtgttctgagcccccacagtgggctacctgatatgttgaaagctctttgttactttcagtaagaggggtgcccattgggagcatatagttgaagtgaattgacagagatttatttcagaaagtcactttcagggtcagcacaatgagccaaagcttctgttgttctgcaaaagcaccaaaaactgttcacagcaatggccttcaggcgtggaagagaccagtctccaagaaggagacagacatcgttatgttctgctgatccaaagataaagggactaatttaggtgaaaataatcaaatatccagaattatacacactaaaaattctggtgtattaagtctctggcatatataaattatattttcacagtggttatattatctcaggtctaaaagtactgccttgttacactttaaatcctacataagaagagataactttcaaaattctgggatcatatttagtatgttaaaataaattgcaataattcaggaaaacatttattatcaatttcagtggaaaatctgactccttaatgagcacatttttttcactaaagccctttattcatgtttattagagaggtttctgttctattaggatatataacacatagatgggtcaaatatcctagttatgttttcatagattgtgtgtccagttgggtctagaagatttattttcttgaaattgagggttggaatgcttatttgttttctaagtttttaaaaataataccctacattgtaatgatgcaaagtagtgctcatataacagacaggattataaggtaatagcctttcttataaagtagtagacacagaaacaaaaccaaaaaatacctaggatttgcattgccattgaacagataaaccattagattggtttcaagtgtaagttccttttagtcaaataagttactacaataagcacttgtcagatgtttgctacttgtcatggtattgttattaaaataagtattttccatatactgggtgcagggagatgagggtgtattaaggttttataggatacaccctctgttccctgagtctgtagtaattcagcacctagaagatgagtgcacataggccatgtcatgaagtggtgtaagtgccccaaagaaaggggcaaggagaggtaaagaggactaaaagagtgttatgaaagaggtaatgtttgctatggacttaaagaggcagatttgataaggcggtaaaaaatgaaggcagcaactcaggggactgtgtggcaacagtgaccacagatcacctagatgactgaggtgcccagtgttcccgtccctgccctgcaagaaaggtctggctaggtcatgtggtaatgtctgcagtcccctcatcacacagcagagtgccttatgcacactagcagctcaatgcatatgtgctaggtgaataaaaggaagaggacttatagttatttccatagccattaaggagttgtttcttcaacaagagagtgagatccctatggaaagcagtcctgccctgcattgcattcatcttccctagcacagagctgcatacaaaggatgctcacagtacatccatggttgccggctggtatatctcagtgtatcacatcaaattcacctaaatcatgaaattaaaatgttggtatttcttgcattgaagtgtgactaagaggaataccacgtcattatgatggcagtataaactaattgctaacaatagccttcatgacttagattccttatctataaaatgggaataatgatagtacctacctcgtagttgtgataattaaatggattaatgacagtgaagtgctgcaaacagtgcatggcgcatagcgttatgatttttgttttgttaaaagagaagatattgatgtgagagagctaagctctgacaattagttagaagaaagaggagacaatttatccaagaggacagtccatgtctattccaggaaaatattaatgactgttcaacctattaaatttcacctgttgctgggtgcggtggctcacgcctgtaatctcagcactttgggaggccgaggcgggcggatcacgaggccaggagatggacaccatcctggctaacacggggaaaccccgtctctattaaaaatacaaaaaaatagccgggcgtggtgacgggtgcctgtagtcccagctactcaggaggctaaggcaggagaatggcgtgaacccgggaggcggagcttgcagtgaactgagattgtgccactgcactccagcctgggcgacagagccagactccgtctcaaaaataaataaataaataaataaaataaatggataaataaataaataaatttaacctgtcagcctgataatccctatcatattgtttataaatatgagccatagaagttggagatgtttatctgaacaagaaagatattatataaactttcaaatgctgatgcatttgaaagaaacagtatacacaatttaattatctttgctttgcatttcaagtctcaataggataatcacttatatttcatattgtaaggagcaagtatgttatgacccccaaggccttgtttagatttgatgaaggaataacgtgcgtgggattattgcctctgtaattgtgtaaatgtctttcatatttgaaaatacttcaaatgaaacaggaatgttctagactgattgttttatgcagaaaatgttaactttgtacatatgttatgtggaagaccattttaactttcagaactggtattcagatttgttcagatttcaagaaaacggggttcattttaaaaatgaggagatgcctggcgaagtggctcatccctataatcccagtactttgggaggcaaaggcaggaggatcacttgagcccaggggtttgacatcagcctgggcaacatagctagaccttgcctctacaaagtaagtaagtaaataaataaattaggccaacattgtggtacctgcctatagtcacagctatttgggaagctgaaatagaaggatcacttgggcccagtagttcgaggctgtagggacccatgatcacaccactgccctccagcctgggtgaaagagtgaaagcctgtcttaagaaaaaaaaacatggagactaattagcttctaaaatacttgatagtgctattttgaagtcagaatgctaacttttcaattcttttccatattttagttatttgaataccatcagccagatatctttaatatattaactgtaattgttggaggattgatttttttctgaacgtttatagaaatctttccagagagtagattcctctttaagcaatatagttatgtgactgaaaatgtacatggaaaagaaaatgtatgctgcatagttactggagtaaagaaaaatttaatcttagctaaaatataagttggcattacatgtaagcattagcattattacttaagatcaatacagattttgtgaaaaaaaaaaaccataaactaatccttgtattaagaaaaatgtagtgacattaagagagaaagcatcctatgtgagagaaaaattgtattcattacgaacaaaaaaccacacctgcaaatatttgtccctttctgtaaatttcatattgaatctcaggagaattcaatagtgtggtaaatgtaatttgtagttctttacaattatggcctaaatagatgaagtctaaagggagttttcctatttgattttcaaatttgcatcacttaaaatccaatcaggccaactgttcagatttttgttagatatgaaatacatgaatgggttcagaggcttcgctgtgtattgaaagaacatatctgactttacggcaggccttacctaaggggttcagtcagcttgtggttcaaccccattcctgtaaagaatgtttactgactgcttgatttgctaacatattatacccttcgattttcagcaaccagtgttttataggccagcagattgcctttgatttttgagaatttgtggtaacatattgagcttaccagatttatgcaggaatgtaaaataaaaatagtgtagcaggcactcgggatttttgaacacagaggggattagctttacagatggctggcacatataatggcattgagtaatttagccatgtaaggtaatctgttgttgacagaatacattaacatttacccaccatacacaggtgtttgggttgcactgcgcttctgactcagaacaagcagcatcatttgtagagtcagtctaaaagtttgaaatctctaaaacatgcttgggtttaaggacttattttagggagatattctaagagtttgccaaaatatactatataatttattcagcccctctgtccttaaaatcattatcctctgttggctacttcgtaaaatccaaatcatcagagaatttttaaaggattctgatttaattaatggaaatattctagcaaaagagcagaaaactacatatctaactataatttcacaaacaatgtaaagtctattatccattctcctgcaataatagttcttaatttagccatatattagaataatctgtgggacttactaaaaaagtacagatatcaaaacatatacacagccaccccgcccaaagataaagtgcttcaggtgattctaatgtacagccagggttagtaatcttttcccaataattaaatttacccctgcatttaaaatatgtacacattgccaggagtggtgactcacggctgtaatgccagcactttcggtggctgaggtggacggatcacttgaggtcaggattcgagaccagcctggccagcatggtgaaaccccatctctactaaaaatacaaaaatagctgggcatggtggtgtgcacttgtaatcccagctacatgggaaacggaggcaggagaatcacttgaacctgggaggcagaggttgcagtgagccgagattgtgccatagtactctagcctggatgacagagtgagaccctgtctcaaaaattaaaaaataagataagttaaaataaaataaaataaaataaaataagtacccataaaagcatctttgtttctaggtttctccattcaaactatcctacccacaactatcaactttccaaaagcactccttgaatcgtctttcatttccccaggaacctctgatgatcctgatgccaatgctgtcaactctaaactcggcttcctacagtcctacagcttctggatcattttcttttgacaattgcatgtgcatttctgggcacttccccagttaagtctgtaccatggctgctcatttcataggccatgctgttgcagtctctaggtctttgctcacagctgtgccttctccctggaatgcattctttgctcttgctgcctgccacctccatccaaatccaagttctctccctaggtctctaaatcacattcttaggatccccacccaaccctagtaaaagtaaatttgtattgtatttgtggtctctccaggccacctaacttagcactcccactgcttattttttatagtcttcactgattgcttcaggcatgtcatgtcttatatttgtcctgttacctactacccactagcctgaccttctaccaagccaccccacaccgtgccagtccaaacccaaataaacaggcaaagcaaagcaacaacaacaacaaccgaaactttgcacagggatggacagacactagatgctcaattaataactgctgaaataattgtgctcaaaaagggaggtaaagattaatggtgatgcttgtagaagtctgtgactatttaaaaaccactgaattgaacactttcaaggggtgaatttcatgtcatataaattacatctcaatagagttgttataaaaaatgaggtaaaaaattttatgaaagacattttgaaaatgtgaattttacttttctagcaaaagaaaagatataaaacaataatacaagaacgaaattgaatcctagtctgggaatattctgaggactggcagtttttgtggtgtttcttgttatgtgaaacttgagaacagggctggcaaactatggcctggcgcatgtttttgtaaataaagtttcattatgttgtctgtggctgctttcacactacaagggcagagttgagtagtggtgatggagaccatctgccctgaaaagatgaaagtatttactgtctggttctatggagaaacagtctgcctatccctactttagaatgtatgcgtgaagctatgttaacttgtattatttatacagcatactcatgagaagctaaaattcttaacaaagtctttctgatgctgacaaggtttttgtgatgtctcaggatgtagccctgtgaaactaacatcctatgaatgaagataatccctttcttcagagtttttgttaattcaagcacagcgattgacatcgaggcatgtgggtccttctgctgacgttcaattctcacttccatcccctctgtccttcagagcccttctccaacaccactcttcctagtgagttgaccctcactctcttctggaaggtagattcccactttttaacccttcttacgtttggcacctctccctgaagcatttctttcactgtaccttggttggaaattatttgcataattttcactccaaaaacctgaaataaataccggtctttgcacagttccagacgagggaggcacagagatgaatgtgatatggtatgtacgcctgagttcacactcctgtcctcatgaaggcagccagctttcttggactcccccactttccctctcctttctgcattacctgtagccaatttgtatgactgtttgctttcttctgcatcaacaaggaagaaccacacaggtagattgtcaaaatttcaccctcgctccagcacttttctaagtccactggtgaagtacgactgacacacagacaggcgattattgggtaggagtatgggtcctgccatcttgtgcctgcttctggatcatggctcctccaacaacttttgtgtgaacttaacctcacgttctttatctgtaaaatggaaacccagttctttgggttatcatgtggattgaagggaatgatatttggtaacattgctggatatgtatgaaactgtcagaacatgttacccattattatttcatttttcatttctagctcagtgcttattcactaatttttaggtcaggtagttagaatgagggccagtatcataggttatggttctccacttagtttacacttccagaatattatgaagtaatagaatattgtatcagttcattttcacactgctatctagacactacctgaaaagggctaatttataaaggaaagaggtttagttgactcacagttctgcatggctgaagaggcctcaggaaacttacaatcatggtggaaggccaaggggaagcaaggcacctccttcacaggcagcaggagagaagtgagtgaggacacaggaaaaactaccatttataaaaccatcagatcacgtgagaattcactcactatcatgagaacagcatgggggaaaccaccccaaaaatccagtgattttgctacctcaacacgtggggattacaattcgagatgagagttgggtggggacacagagacaaaccatatcaaatacgtagcaatttataattggtccataaaaggggtatgacttacttcattgtcatgattaaaaaataaattcagctcttctactctggactgcagatctcaaatccagtcttctcttgtttcactccttgtctctttctctttcatttctctgtgttacagatgttgctgtcatataaatgtcttcctatttgtaaagccattgacctcacctgattgttacgtataatttttggctgcacaaattacctaaacccttccaagagcataattagactcagcaaactgtttatctttgtgtgtttttcactgtaaggttcaagcagcaatacaaatggaacaaaaagaatctgtgagtcaactacactgtgcacactggtcccatgaattctaagtcatatgagtctaagactaaaatctgtggtgatcatgcagagatgcaaagtatatgccaggttttcaaggatcttattttgattagacctgtgggtttttttcttttcaatatcgttgttattcagagaacataaatgagttatgaggtagacaaaggcatgaatacttgtgatatattttacctaaaatctgctgtttcagagttggttgggagcagtacataccaacttcagaagaaatacccttctctttgaacaaaatgaaaattaaaatgatgcccttttgttcctaggaatgctgcctcaaacttaacattagttgtaatttcttggacatcatttcaaaccaaaccagaggttaccctcagtctgactgcaccagtttaaagcacatattttcatatttgacatgttttattatggcagaatctgaaagtatggagcagtatgacgtattaaatatctgcagcaccatatgtttagatctcttcatcttgataaatgtcccactccccaattctgctacctcccttttattgtgattcaagatctctcttcccttcatgtggtttaatagattaaattttagaagccagaaaaaaattaaaacaatgaaggggagtttcgtgttatgcttttgtagtgctctgagagggatctaaaaagaaagggggaggatgactttatttctttaagtctgatgtgcttcatgatacccgtgtcctcattccacaggtcagagtgtagagaagaccacggtaacaggggcagttgaaatgcagctatctgaccctcacctgcttggtcaggatttcagttgtttgcagtttgtctgcaaacagttctggagttccccaggtgacatcagagagtctcgctctgtcactcaggctgcaatgcaatggtgcaaccacagccttgaccttccaggcttaagtgaaccacaggcacatgctaccatgcccagctaatttttttttgattttttgtagagacagaagtctgcctatatttcccaggcttgtttggaactcctgggcttaagcgatccttctgccttggcctcccaaagtgctgggattacaggtgtgagccaccacactcggcccccaggggacctatgggttcacacacaaggctgctcccatggacatcacctggcctctgctaggagccgatgagtatacacctgccagtcactggtgaaagtggaggtctgaggacaatgcttacataccaggtttctgataagaagtaaaagaggccacctctgtcctcctcagttcaccagaataacaggatgtgtgcaattcctgtttatgcttaaactgctgcatagatttaggctaatgactgaatacaaaaaccaggcatagtagtttcaacccaagaagctgtggagcctcaggctataataagtagccagagagaggttgaatgggaacctccctgttgcctccactcctgactcatccaaagcaactcaacttttatgtgttttacacactgagactccagaaaattttgcttaaaattttactctgccctaatcagtcaatttctgcttgtgttttatgatttgcattttagtcttatacaaaatactttccttttaacagaatacttatgaattttgcgattataaacatgatcttataataccttaggacaatatttacgtttaaagaaaacacaccaacagtatattgaaagctgatgggaaaatgaactctgagaaggaaaagtgctttcatacaacttttaagaaccattcctttatcaatataaagtattcccttatttgaaggtttgggcaaaaaaggcaggagagttttatttcataattattgtcaatttctaggggttgaataatgaacacaaaattcattagcattaagctttagcgatgagagagaatttatcgaacccatttttctgaactatcaaaggtatcttgaaagtctcaagtcatccagtttcaatgcatacctcagaatattcccctggccaccttagtggatggaagggcaggcaaataaagatagctattccaaagacagaaagagtaatacaatgtcttatccagagagtttacagaatcttgagtagttttcatttactatgaatacgtgtgggtttttttttttttttttttttttttcagtgtatgaagctatttaaggcagttaggtttgaaaggaaatgaaaaaataaagtggatctagtgcagaatgatgagtgaggaaacggagaatcagagaattccatggagaaaagtaacaaaatctcatccaaacactgattactaatgtgaattccttttcaacatccccagatcctcttctgtaacttcagtgatagagaagcccctgagagataggcagtgcactgtcatgggaaatgcttagcatctcatgctttaaaggctcacatttgagttctggccctacaagactccttctagagtgagaccctgagaaaattttcagcttctccaaatcccgatgtcttcatttgtaaaataaacatatagtgctgtgctggtcattatgcatcttgtccctcattctttacccttatctctgtccttctctttgccctaggaggcttgacctctacagaaagcatcttccatgtctctttgcttaccagcatcctgttgggttgtgtccatggaaggcaccagcaggagatggaggagggcgcaaggagagagaacacagtacttctttactggtctctgactgctctgggctgtgtattctggctgtatccttccctgtctacagctgctttggttttatgtcaacagggtctttcctggctcctgtaaagttagttctttcccatacctcttcagggccaggagtaataaagtcttctccttccttcctgctgttgcaatctctgagaatctctatgtctcttgttctctttgctctgacctctgtgtcaaccattcaaagtgtcttgaaccacctgcactggattctcattcctgtcaggaccctgtctcatcccagtaactagtctttctcagatttgttgagaagttctaatgcagtactatatgaaggctttttaagaattttacagctgttacttttcaaccttattgtaccaaactagccatttctttttcattgagctctcatacttattatcttaaacttgcttgtacattaatatgatgtctcctttcatattagggattaaatgtaatcattgacagctcttcagattcttaaagacagtggcatttgcacccaggccttctgttctttgagctaatcagtcaaaattacttcaaatattattcacatgacttggttttaagtttttcctccattgtagtcattctgttgcgcacatcccagttccagatcatttcctctgtaatgttcagaacttgactcaatatcccagatatcatctcaccagacaggagttaactattttttccttttcgtttgtctatcagcctcttctctgcagcacttttttcctttttcttttttaaccttgtacattaggcagaacagaccccccaaagatgtccatgccctaatatctatgaattagtaacagaacttgtgaaccaatgagtatgttacagaaatcttccatggttaaagggactttgcagatgtaatttagttaaggatctggagatggagagactgtcctggattgttcgagtggcccctaggtaatcacaaaggtccttaaaggaggagggaggcagaaaaggaggtcagagtgatgccatatgagagctcaacttgctgttgctgggcttgaagatggaggaagggaccatgagccaagaaatgttagaggcctctaaaacctggaaaaggcaaggaattagattgttccctaaagcacccagaaaggaatgccggtctcctaacaccttgattttagtccagtgagacccatgtcttatagacctgtgaaaataagtctataagataatacatttgagtcgtattaagcaactgaacttgtggtaattttttttagcacaagaataaacaatacactttgtatgaaacattgatctcatttttttttcttttcataagattggccctatcattccaggttgttgagaatatctttactcatatttctattatttattggattaagtgtctgttgaggattcattcattcctaaatttgttctgcatggtaaccatgttacttatgtaggtcttggccacagctggatcctgataaaagtccaaaggtttgatatttggcatttctctctaaattcgcaaggatgtattaatcaacaccatttgtaaccgtatcttactcgactgtagctccgtttttttttctttctttcttttctggaggcagggtctcagtctgtacccaggctgtagtgtgatcacagctcactgtagccctgcatccttaacctcctgggctcaggagatcctcccacctcagcctcctgagtaactgggcctttagctactatttgtctatattatccaccagaccatcaggacagatttgttacttttttttcatgagaagcatatttagagaaatttgccatctcccctatctactactctagtaattctatcaaaaattgatatcagagtagtctagtgagtaatttagaacacagttgaaaaaactttcaaattaaaatcccaatttcattacttatgaccattctgtagcctgataatccacacaaagaagaacaagaaacattgccagaattaattacttttacatctcctttttcaatagctagagtgggtttgtcttacgccactcttaatgccttgcctctatgtgaaaatgcaggattcctggaaggcgcaatcctttgggaacttgcagaagcaacttcatgtattagtggtcatcaagtaaacaatcagctaccttgctaatagtgtcatgagggtaactcctgaactgctgtgctactttgctttgggcattagtggttttgtggccccttctaagccatttacacaagtaggagcagtgagatttgctcttttcattggatcatattttcttcttgcgcagaaagccttgtattttctgctaggcacttggttggaatgggatccatatcaatttgtctcagctgctgaatggtacttactatgttatatggtgagctataaagctctgttcttaataaataggtgaactgcttttccatccctgtttctcatttaatttaatttaatggagaatattcaaattggctacatgatgctaattcatgtttaaaagtgtctgagtttggaattcaagtccttagagtatgtcaggacaaagaggtttatgagagaaggtgtatttattgttgagatgagtagaagaacttaattttagttttattttaatatttagcatcttcatagctacttttaaaatccactagagaaaatctgctcaggtcatatttctaagatcctgacaaaagaaaaagccattctcttgaaggttggggaaagattgtcttgcaattctgctgactcaactgtaaagttacaatgagtacatctcatacaattgagtagtggccagtagtaaggaatttggtgtttgacatgtttaatataactcacatacatttgcaatttcaaggaaacacaatattgtttatagaagccctctaattttcataagttgctaccttcatttggtacctactgattatcatgtgctaactaggagaaaacacctacaagcaaacaatattatagtgctgcgattgattctgctttaatgttgcttgttcaggtagcaaagccattagctacttcttgatagtttttatgaatagacttagcacctagtattgagcaaccactgaagaatgcatcttccgttaaaaggttgatttattagtttatatgtaaaagaacactggaggttataaaggtaacaaagaccttaaacattacattgatttttttttctcagagctttttttcttcttgttgtattgcagggtaataaaatttcactaggcccattggatctataaaatctgaagtacaaccaccaactgatacaaatgaaattgtttgactggagcgataagcaaggacttggctttgaactctgagcagtataagtcgtttctctggcccgtgagggtgaattacagcctgctgtgcattaaaggacaggcatgtatttgtaggagctcccagttcagtaatcactgggtgatacagtgacctttacatggccactgtagtttcacaaagaggctctttagacatggaaaatcaacaccatgcctttttaatagaacttagatatttcattatgcgaattaaaattgtggatggatataagatctttgatttctgaaataaaaagtagaataggaaaataggaagttttgtttgcaaatctcaggatgtattatatttaagatagtgagcttttctttctttgtgtgagttgcaggctccccatagtataatgtgctgttctgtgacagactagaattttttgggcctctactatgtgctgggcacagacttaagtaaattcttggcatgcgaaccattagctcatgttacctttgtctccctgtagccccagtactgtcccttgcagctcccagcactctatcactctatcacccagtgcttgaggcatgattcccttattaccagcctcatcagtcaagtacaatagagagccagtgggaaagagctctgaaacctacccagcaaagtgaagttctgattgcaacggtgaaggcttgagagcagtatgcaaattagcgaaaaagtaggcgaggtctaccttaaagctggcccggcctggcgtggtggctcacgcctgtaatcccagcagtttgggaggctgaggcgggcggatcaccaggtcaggagatagagaccatcctggctaacacggtgaaaccccgtctctactaaaaatacaaaaaattagccgggcgtggtggcgggcgcctgtagtcccagctactcgggaggctgaggcaagagaatggcgtgaacccggggggcagagcctgcggtgagccgagatcgtgccactgcactccagcctgggtgacagagcgagactccgtctcaaaaaaaaaaaaaaaaaaaaaagctggctctgttgccatttttgtaaattgatatagaagtgattcagatggacctttccctggccagctagcaaaatttttaattcatccagataagtgacctgaagtctccaaaggtataatttaaaggcatccttgactgctatcacatacctgggggtggctagagtgggaagtaaattcacaataactagctcttcgtctgttactgccatgacgaggcaacctgaagccactgaggccttaaatcaaagccatatgctagacaagtagccatctttcaaaggtactgtcttagtctgttcaggctgctataacaaaataccacaattggctggcaactgacttttatttctcacagatctggaggctgggaattccaagatcaagacactggcagatttggagtctggcgatggcctgttcctcatagatagtgccttctagctgtgttctcacacaatggaagggcaagatagctttctgcagcctcttttaggagggcatctaatcgtattattcatgacctattcacctcccaaaggcatgcctcttaatactgtcacactggggatgaggttttaacatatgaattttggagggatacgaacattcagaccatagcaggtgcatttatcatcttttattttttggagcctaaattcaaatttgtctttcctgtcacttttaccataaccacagatttatttgtttttcattttgctttaggtattatgtgttgcatataatatgccatattaatccccaacacagtggagaaccaactgtgctggagaggttaggatgggggtcaaagaggtgctaagttccgactggtaggtccctcttttagtttgatagatatgattggagcacatgttggtgcacattggagccaggtgcagaaatttgactgttcttgcaatgaattaatgttacacaaaattggccgggcgcggtggctcacgcctgtaatcccagcactttgggaggccgaggcgggcggatcacgaggtcaggagatcgagaccatcctgggtaacatggtgaaaccccgtctctactaaaaatataaaaaattaaccgggcgtagtggcgggcgcctgtagtcccagctacttgggaggctgaggcaggagaacggtgtgaacccgggaggcggaacttgcagtgagctgagattgcgccactgcactccagcctgggcgacagagccagactccgtctcaaaaaaaaaaaaaaaaaaaaaaaaaatgttacacaaaattgtgtctcacatattgccatattgcctaaagattgtgttctaaatgaatatctgatagggtccaatttacttttgcaaataaaatgccctgaagtctcacattactcctatgcatatgtgtgttcgtttacattgtatgactgccagtcttgtgtaagtgaagtggaaacatgtacataaagagcagatgagtgttacacacattctcatgttatgccaggatggtgctgatggaaggctaagtcaagcgccacagtctaggtaagttcttgcagcaaaggttcctaaaccagggtagacaaatacgatgtatacatccagcagcatttcatgccagccatcactgcttgatgagagctttctttctgaaaccacaaaatgcatctcaacactgcattccagatagcccatgtcagtcactcactgctgtcataccaacaggaatccaactgccttttgccacccttaccctagaagatcactctaatggccactgggcagagctgctttgctgccagcagaaatagacatgagtttaatgtgggccacagggtacacgtcacacctgccagcccacccacattatcccagcaaaacaatgggctaagtaattactttgccacaaaatgtccgtttcccttgtgattgagtcagtgctaaatgcatcttaccttagctggtagaaatgacctaaatgatataacaaagcacagccaaacccctgccaggtagacctttggaaatttgattctcaagcaagtagcgtttatctttctgactgatgtctagccatgtttctatttctgtatctatctggagctctgcctatctaatcctttgttattgctggtaatttcaggaaggggttgggggtggaaattgcctttgaatggagtaaaatttaacatcaaacctgtgaaacataccttggggtgttccagtggttatcagctctaagaccacacattctgcagacagagcatgtcctagaatacctgcatggccagttgattcgtctcagaaatcccacatcttgattttcctctatcttctgttattgtctcacttaaactaggttgatcttattgaaggggaagaggaaattcacatgtcctgaccggtgtcagaatctttacagttatttcatttaatccatataatgccactgagacatgggcattattatctcatttttcacatgagacaaccaaggctaatagagtttaaggcacttactgatgatcttcacaatattgcttaaatttatgaatgggagagccaacattcaaatatgggtttggaaaaaaaaaagccaagctgtttatctaatgaaggatattacttttccccttttagcaactcatgagaaaaagaagtctttatgaaatttttctttgaaaaatgtcattaaaagtttgtttttgttccaataatccaaacctttgtgggttctagtttatgaaaaaaagatgtgccttattccgtgatttccttctaaataatgaattagagagaggtaaggtaattctctgaaggatgcagatagacgaattacacaagttctgggtaaatgtgctgacaataatgaatagaattcctatgcaacttgatttggtgcaatattgcccagttcatatggtgccaaccctcattcttccccacccctccagcctcgttgcttctcttcattttacctgattcttttcagaaaaggtgggaattagatgtgtgaaacttacatgataacccagggatcccctttttccagtttctctaagctaaaataagtgacatggtctaactcatcctatgtgtaggtgggatgccaatatttcacctctacaaaccacattaagtggcaagggatacctgaaatgtaaataacactccattaaagtataacttttaagaaattggcagaatcaaatccctgtgcttgaatggcatttcgaagcactgttaattccaagaatttttctctctgttcaagtcactccgaggagtcattttcatttgcctgtctgttcaggattttatggcatgtaagtgacaagcactccctgtaacacatcgtgggagggcacccgctaaaagagagctcaaactgaatgacattggatgtgaaatgcaacctttttctgccaggctgtgtgatatttagcatgccttgacatatgctaagctacaaaattttaaagcacagatcccttgggaatgttacatggaatatgtgggtcagaattctctcgtgattagttaaaatgtctaaaacatttttcacaatttcaaatgaattttttcttgagctctaccataaaaatttgacatattgaacatgactttacagactttagtctctaagtaaatggcttcacactattggaagaatcaattatggtggatctttctaatgcatactgtctataaaaacaagccaggctcggtggttcacacctgtaatcccagcacttttggaggccaaggggggcggatcacttgaggtcaggagtttaagaccagcctggtcaacatagagaaacgctgtctctactacaaatacaaaaattagccaggtgtggtgtcgcatgcctgtaatcccagatacttgggaggctgaggcatgagaatcacttgacgctaggaggcagaggttgcagtgagacaagatggcaccactgccactgtactcctgcctgggtgatggagtgagactatgtcaaaaaaaaaaaaaaaaaaaaaaagaagaaaagaaagaaaagaaaagaaaaagaaaaagacaaagaaggaaagaaactgacaagttttaataatcaagatattggtatcttgaaacatctaaaaataaaataattactggtgataggtgaggggaatacatacgtatattttttgcttgcccacaaaattctgggtatgttactatttgctgtccttcatatccaaaagagatgctcgtaacccattcatttttctatggtgagtttttttaatatcatttattgaagtttgtggccatattcaaacaggcaggtattttatttcctctattagataaggtatttatttatgttgctagcacttgatggttatgttctccttgcttccgtcttatatatatatatgtgtgactagaatcttttttgggggacagggtcttgctttatcacccaggcaggagtgcagtggcacagtcatggctcactgcagccttgaaccatggggctcaagcgatcctcccacctcagcctctcaagtagctgggaccacaggccccctccaccacaccaagctattatttttattttttgtagagataaagtctttctatgttgtttagcctggtctcaaatgcttgggctccattgatcctcccgccttggcttctcaaagtgctaggattacaggctttagcctctgtgcctggcctgtaactgggacctttacacctacgtcattaaccttaacagccctctggggcaagagcatacctgtgatcataacaggaaggaaaaaagctgggaagaaaagaaagaaggcagccaatgaagagatattcagaatgattgttgtcctcgccactccatggaaattgctcttttcaaagcatcagtgacttctgtcttgccaaatccaaatgtcgtatcttttacgacttttagcaacattcaaaccaggtgattactatgcctttattgcaactttttttattctattatttccttccttcctaccttccttcccttcctcctgagacacacaccttcctgttttttcccctaaccataccaggcattttttccagaaccactttcctggaggttcttctgctcctgattctaaaattcgcagtgccttggctcttctccttctaaacacactctttagcaggtcctgtctatttgtttccaaggctgtaaattcctcctgtccattcatgacttccaagtttataaccccagccctgacttctctgtgctcaagcctatgcgtgcacacacgcgcacgcacgtgtgtgtgtgtgtgtgtgtgtatgttactgcatagttgagctttctagtgcaatgtcaaacaggcagctcaaactttatatgtgtaaactagaatcattgttttttgaatcaagactgcttcctctccaactgttcctaccccaaccatcctcatctcagtgtgtgcaccgctgatcatccaggcgtctaggtcccaaacttaggagttgtgcttgcctcctacctcacattcaatgcacctgcaggtcctgtagtcttctccttcaaaaggtctcaatctctacaggctcactagcccaacaagtttcacctcctcaactaatgcaagggattctaatgtgtctctttgtttcctctcttgcctcatgatgaccaattctccaaatagtagctagggtgatcttttataaatgcacgtgaaaacatcccatttttctgtttgagccttctcgaataaaatcctaatgccttaccctgatggatcaacaagatgagctaatttctccaacaaacaatccataaaactcagtgatttaaacagatttaccttaaaagttatacatagaattactgtatagcccagcaagtccactcctaagtatatactccaaagaattgaacatagtcactcaaacaaatacaggtacacacatattcatcacagtgttgttcacaatagccaaatggtggaataacccaaatggctatcaacagatgattggataaaaaattgcggtaatgttctctagccattaaaaaggaatgaataaccaatatatacttcaatgtggatgaactcaagaacattatgctatataaaagaagccaaagcaaatggttatatattgcatgattccctttatataaaatatccagaattggcaaatctatagagaaagaacataggttggtggttatcatgggctgaggaaagggagaaatgggaattttaacaggcctggagtttccttttggagtgatggcaatgttttcacactagatagaagtggtggttgcacaaaattgtgagtgtactaaataccactgaattgtttactttaaattgatgaattttatgttaattttacttcaataaaaaaaaaacagagctcatttatatcacaccctcatctagagtagctgaaattcctgctctatgtgttggtcattttcagtctcagaacccaggctgacagagtagccactgtttagggcattctttgtaaaatacaaaattcatgagaacagaaaattgtttcattaaatagttttaaaataggctgagtgcagtggtggctatgaacccaggaatcagcttgggaacagttttccttttctccatatggagcaaaacatgcaacccagtagctggtagcaatagtctccgtggtccattcaggaaatggcagaggagattaagaggctgagagttattccagcattttgggaggccaagtcaggaggatcagttgaggccaggagttcgagaccagcctgggcaatattgtaagaccctcaactctgcaaaaccaaacaacacaaaaaacaaaatataaacaatccccccacacaaaataaagatatacaaggaaaaaatacctgtttgacaaaaattccatttcgtatggttacttgatatctgtatgttagttatttgtcttcgccttatttagagagttgaagttcaagtgtttacatggcatgacccttctttttttttttactttgaatcccttcgttgctccagtgttattccagatttcattactgatcttccaactacccctttttgtattgagaccatttgtgttaaagaaactgttgaacataatcacatttttcgtcttaatagccctatgagacagatactatgattatccttatttaattggtggtgaagtaggctcagggtaagcagtttgtctgtggtcacaccatctattaagagacatcattacttatggagtgcagactgttgacttcagggaccaaatctaatgactaaattatgctggctttccttgtgcactaccaaccaatattaaatccagtttaagtgactaaattaacaagaacaacaacaacaaaaaaattttaatgtgaacaagaagagcacacatttattaggtagctggccagggattggaactcaatattttgggggaacaacaaactaagccaactatttcttgtgcctcttttggagccccgtgctctaaagatggctcttttgaaattcaaggacagcaaattatatgcatttgttcctgattaagctaattcactaagcactttgcataagaacatggctaaagagaggactgtccttccatccactggatttcaataacgcggttaaaagaaagaggtcagaaataaagaaattacaggtttgtttcaccttccttttaaaatccttattacagacataggaatgtttccaaataaattgagagaagaacagaagtaaactacctgtatatgagaacttaaggagaccacatagagacagatagatactttggttgagtctttagcttataacttaaacagtggtggtaggggactcactgtgcttttttctgccttctctgtcttcctttggttgcttttcctttcactcttggccagtgattattgaaataaagcatttatctctgtgtgtgatcaattaaatcggaaacactttttgggttttacaattctgttcaaggtattgtttggctttgtggtttctaagatatattccatgccaaaagtgtggttttattgacaaatgaatacatttagctggaagagcaagacagctttggaggaggtggaggaggtagaaataacttactagatggcacgatttgaaagtgaccaaagcactcccaccacctgtgaaagcgactgatattctactgttactacatgtgaaaggtttagatccttacagtaaataggtgcatactcctagtaggggtaagcatttatgccctcatgaactaatgcctttcttggggcatggtgaatgaacagcctttgggaacagtgttatagagaaagggaattcagatgggaatgggaggagcaagcaatggtaggaggacagtaatggagagcaagaggaaaggctcccccaaagtcaacctgcttcaccaccaggccaacctcttgctagatcaggggcttatttctactccacgggtatgaggctgcttgaaacctcttttcaaaaatgccttggggaagaaattctaactatgctgattgtgtcaaagagcctgtcttaattctgaaacataattccaaatatttctggccttctagaatactgtacctattctaacttagtcatgtcagtctcagcctgttattctcctctgctataccctgaatagaccacggtggccattgctaccacctacggggctgcatgttttgctccgtatggagaagaggaaaagcgtttccaagctgattcctggattcacagcatctatgttaagtatattagcaccttccatttgcaactgggagggtttcctcaggaattttattctgtcgggtattagatacaataataataggtggcaggccatactggagaatggagggcaccagtaaattactgtgaggaaagcaatttgacatcctttcatcctttgatgaaagctaaatgtgaaatctaggtgtaaacgtctaaaaaaattgaaagtcacactcagagggggagacctaggagtgtggcgaaatcactactcagagagggaaaagacttgaggttggactgtgatttgacaacattatttctttccaagattaatgtgtctgtggaactacttggccttattcctgggtcctatcaatttagcaaggacatttacacaaatggcttctgtagtctagctgatattggggccagaaacactggcccaagaattcaggttcttctgttttgaaagacgtataatgctggggaggcgagacagccccattttggcatccttaacttgtttctatccttctacctaaggctgtctgataaggactgtgaattttacctcactatgtctttgttcaatgtttcttgtaaactcaaaagcaaatgtacagacatagtcagctatttcctcccctcaccttccactcaaaaatatactttctttgaactaatttattttcccttcctcaagacacgcatataacatattatcatcactattatcatcatatttccttatatcgtttattaatagtttcatatatacatctcatttcctgaattaatggtgtttttctctgaggcgggtctttatctccacagtgcctcgataaagaatatgaacgctagctcttatgtggtacctacttatcctaaggcaggtgctatgttaagcactttgcatggatgacctcatttactgctttcaaaccctgatacatttggtatttataattatcccccttttcagaagtgggaaatatggctttaacgtattgtcttacatcacaaaaatgtgagagcagagggatttgaactcaggtttggttgcatgaagagctatgttgtacttttttcttagtaaatatgtgatacttaatggtgccttagtgctttggaacacactttcttgaaacgctgtggcttaaaacagcaccattttctttttttgctcctaagtctgcccctgagtttgtagtttggacaaggctaagcaaggatagctctactgtgtgtcagctggagcaactctactgggctggaggtcccatctaagggggtcttacaagttggttctagttgctggctcagttctcagctggggctgtaagttgaaaacctcattgctccaccacctagtgagttgggattcttgcaacacaaaggcaggaaatgccaaggcttcttatggcttgggccccaaagtggcacagcatcacttccaaatcattctttggttgcagcagatcacggggccaaccagactcagagaggggaccatacaagaacatgaatactggcaggcacagttcatcgtcatggttcaaagttaagagtctgccacacaaaaggagcagaacctttgttcattgttttattatcagcaaaaaatctattaagtacccattttattaccatttatgcagcgctacaataaggatagagaagaagatacagcttctacttgtgctctataatagtacctgataccccagaaattcaaacagaaaccaaaacaaagccaatcaaaatgacaagcaagagtggtgagtataaacatgctgcacattggaaaatttggcattttcattctggagatatttttaagagcaacaacatccaaaatagtattttattctaattcgtggtatgtgtgctcctttattttaggcactttgactggcatgatcttcacaagacagggaaaagacactcaaacacatgcacgtctttacgtctaggtgcaaatggagtaaaaattagatatgctggagttaggttacaagtggagtaagagctgcgggtgtctggattaatgtggtggtttattccaagagcagtaataaagagtcatatcactttctattgcagcagggcatccatttagggaagtggatcttcaggttttgtttccaaaatagagcacatattttcagtgctcaatgaaagaaacaagggagagtgggtgacagggtgctatggcagccctcgttatttatagtttggcaatactgttagtgttcacccggtggagaactgaatcccatctaagctcgtaattttcatatctttggaaagcttttagctcctctctgcctgttggcatggtaacgtgacaagagttatgatgtcaaaaccatatgaactcatgattgatctaaaattatttgggaaactttcccatttcaaatttccattgagagagagaaagaggccatgcagcaacttcattcaaaagagaaaaaacaatccgtttttttttaattgccctgaaataaattctctattttcctttctatgtaatgctaaaaagattactgtctttctgatgtctttggcattttctttcaaaatcagatattttaatttccctttctcttggttatttttttccctattctaatcaaaatcaatggctgatgttagcacgtttttcatgctgcaagtacaaagcagggtaggcatgcaggctgatggatggcctctgggattctcaggtctttcctgaagcgaagttggccctgaggaaatgttgagggttggcagagaggccggtactatctgttgggtacttgcaagctagagatattattatcacttccatgtagaggagagaaaaacagagggtcacacagatgaggtaagttgcctgaagccagaaaatggtggaacagagaagatttattggaaaaaaatattgaagcctgttaacaggaggaataggttttgcccaggtgaaaataagtagaaaacatactcctaaggtgtgtcaacctaaaaaacaaacagagcctcaccaaaatctgatatttattcaggaatagggcattgcaatggacaacctgtggcatagtaaactatgtatgtattcacagaggtaagggaagccaaaggattttaaggaaaaactgaggagtgttacataattgttttgaggtaattatccttagctacaaggatcagtaccaagggcgaaaccagtgtaaggttggacaggcagttgctgggcttgtgtcttcacagaagtacctgatagtccagaagttcaaacagaaaccaaaacaaagtatttgtcaatcaaagtgacaagcaagagtggagtttctttagttttgtttgtttgtttgttttgttttgtttttgagtaatgttgcagtggcctttgtccaaggttggggttttcagagacttttgtgatactttttgttatcaggcattcatgtatgagagccttccctttgtcgccatcttcaactctttttgtcattttttttaaacacagataactacattttgaatctgaaaactttcgcaggtgtatcaccttgggaaacttaggaaacttattgagcatgatttcttttagtctcagtttaccaatctgtaaaatggggataataatagaagtctgctgtagagataatatatgagaagtggagctaaagataaagcccaatgcccgtcgtgaaggagacaaataaatgctaattgccctgtagaagcaaatgggtttatgtggaatcctaaaaggttagcgagaaggttcaacacgtttcttatttcaggcaccattttctgtgttacttaagacattggacttgaccataaggctggacattgacgtacttacttctgctaccaaaataatttcctgtctctaaccaagtctcaaactgaccacatttaagtaaagttcttcatcttcagtcttcaacatcatcccttagcagcattcctagtcaaagaaggatttaaagttggaggaagttatgatattttttctaatattatttgattcacattcatatatatttttagagcagatataggttgaagggtcaggcactcttctaggcaaaagctgaatgaaatggacaaaatccccattattggggagcttaaattttggtgtgggagacagataatacaaattataaacaaataaaacatgcaatgttataaagtgaaaatgctaagacattaatcaatgagaagaaattaagttggggaggagtcagacgaagcgtaggaggggtaaagactgagcttgaggtcttagattaggtagctctgaaaggtgtcattgaggtgactttccatgcagatacctggagaacagagcgtcataccaagtagaggggataacaggtgcaaaggccctgaggcccagagtgttcaggaacatcaagaggctggtgagcttggaacacggtgaatgaggaggaggcttgttttctcattttctgccctaagaatatccttcatgaggtacggagcacttggaccaacaatctgaaataaatggataaggagtgacttgccttattcgtgaaacaaaatgattttgagttagaggcagactctgggttctctccatggtatcattccagtggaacttggtcttcagctgttcctcacagttggtttcattcagagtcatcaaatcattgttcacccttcatgtatatgagagatgtaaggatttggaaaaacaaactcagtttttcctactctactgtcacaacaccgtcaacacaaaacacttctgagaccccagatgtgtgggagtttccccccacacactaagagatcaattttgcagcagattcttcagcagacaccagctgggtgtcctctacgtcaattcggttctgacctagaggtagtgtcagatcctacaggttgagggctcagtcccatgaggctgtccctcacttcagatgccatagcaagcacaggttgtggcctgtgcttctgaccaaccagctataaatcagcattcccacgaccctttcctcaggtccgattaatttgctaaagtggctcatagagcttggagacataccttacttacatttacagtttattatgaaggatattacaaaagatacagatgaataaccaggtggaagacatgtgttagggcaaggtacggggaaggggagtggagctcctatgccctctgtaggcgcaccaccctccaaggaagctacacaagttcaaattatctggaagctcttccaaactcagtcctgttaggttttactgggaacttcattatgtagacatgattgattaaaccattggccgttagtgaggcgcccaaccttcagcttctatcccctaccaggaagttgggggttggggctgaaactcccaatcctctaatcatgccttggtcttctggtgaccagctcccaagctgaatttatctagggatccccagccacctcattaacatacaatagacactcatcactctggaaattctaagggttttaggaactacatgtcaggaaacagagaagaagatcaaatatgtatttcacattctcacaagaggaaaattttataagcttttctaatctgtgggcatgtgtctgtaataattccatttaaatataattaatgcctatctctggtataacaaggatttttgcttgccattcctcactaaactgtggggagaaattcaggccaactgaacaggagacggattgtgactgaataagacaccataccctggagttgaatttcaatggaatgtgattcacacaactaccttctgcagaatgctccttcctttttattgagatgtaaacggattatgtctccattcgagagcacttttgctttctctagatggctgcaaaagtgtcttcttcaggcctttccatcagtgcaagttcaaatattgctgtcccagtggattaaaagttctatttgttgatttgtttgttccatacatttaagattttgaaagaattttaagggcttttgtatcaggcacaggcattacgattacattttaacctcacagtgacctgaaaggtatattgtcccattgcatagacaataaagctttgagaaatttaatacgttcttccaaaatgtatatagtacagaagagccactgtttccttggtgaaggtgtttgcttgtaggtgtagagtgtttggccagttccttccccacttggggcacagccacgataatgcagagaacagcaatcatacttgccctcttaaagaaaaagggaaagcctcatatttctgcagtgcatttaggcacatcatggcttcctgcctttcagtgatcaaattgtttcttaaatatgagacttgttctcagagttatacaatgaatcctatgctaatccactgtagaactgccattttgttctttcctccctgtggtttagactttctgattcacacagagcttgaaacttaaatgttctacatatatttaaaatagtgtttcacagaaatgtattaataggatagtcttactaaataattgggggtaatttatccctaatttatgtgaatcaataaatgcatgagtgatgtaattgcaaacgtacacacacacgtgcacatgcatatgcatgcacacacacacacacacacacacacacacacacactggttctcactcttctttgatatgagagatgtaattatcatgtagacccaggggcagttttgcactccaagggacatgtggtaaacgtcaagcatttttggttcccaaaactggggcaatggtgctactggcatgtatgtgtagaggccaaggaagctgctaaacaccctgtagtgtacaggacagcccccaccacgagaatgatccagcccagaaggtcaacagcacctatttagacttgcctatttttaatattaccacctttactggaagcttgaatttggaatcatgctatcctagaaaatatttctgttctaatatcaaaaatgctttaaaaatacagttattacatgcatagttttaaatagtgcattataatacaaacatactaacactaattggggaaaaatgtagatttttctctgttggaaacctaaaatataacgctttttaaaaaatcttaaaaatacttgttttcctagatttctcctccctccccctctttttctttattttttctttcattttgtgagctttcagactcaataagccttgccagtctgtgatgtgtaaaattatctttctctggccagagggaattatatccttctcagcctcaattcaactcatctgtcagcctttactgagtacctgttgggtgctcaagcttgggtggtgagtacagtggaaagaagggagtaatgcagggactctccagctgaaatactagtacagagcagcagcgggtggtgactcaggcctcaaactgccaaatgcaaaatctactttgattcccacttccacatgaacaggccttcactgaagttcgcatagggtaaggttttaccattgagatgcatattgtttttttcttatggaagagaaggatagttttaacttagggaattcagttgcattcatttcataataatgatactaagacattcgggccatacattttgaccgtatatttgtcttgcacggattacttgggtcaaagttagggagaaggagctctgccacagttattcatcaggagagccctggctttcgacatcggccacccttcccatttcctttgtttgggatgtgtgttccatcaagaatttaagccttgttcatctgtcatctctggcagttagaagtttgcatctaacctgtgctgtgagaactaaattgttctctggccacgggtaccatataataatgactatcatcaagggacactactcccccttccccaccaatagttctgaagatcaagtcatgtaaagcgttagtcaccagttgccttcatcttttagtccagaatcaatagacaatccattgttaccagtctagaagccttaagtaggatgctaggggagaaaagagtttgattcatatctgtccatttgcttcccagtctacacagttgctcataagtgctgtaagagccaccaactactgatgaggagcagttggaaacacgcctctaggcttttcctagagcaaaatagtattaattctggggtcactaattcttcatcttttcatggtgcttcataatcttccattaacaataagagctaacagtgaaacaggaacaattttaaatagtttgtgtattatctcatttataccctgccagcaatgctctattttatcatgccctcttgacataaagaaaactgagtctcaaagaggttaagtcatttgctcaatgtcaagacttttgtaaatggccaagttcatcagattttaattcaaggagtctggctctagaacctgctcacctgttgattattcagtgatacatccctgagggaatcacactcttggatgaaagcagtgtgattttctgataggccggacacagtggctcaagcctgtaatccccgagactccagaggctaaggtgggaggatcacatcagtccaggattttgaccagcctgggcagcatagtgagacttcatttccaaaaaaattaaaaaactatccaggtgcagtggtgcctgcctgtagtcccagctactcatgcggctgaggtgagagggttgcttgagcccaggagtttgaggttagagtgaactatgatcatgccactgtactccagcctgggtgacaaagcaagaccctatctctaaaaaaggaaaaccctgataacatgagtgtgggcctgtggagtatgagatttagaacatcatttcggtgtcccagcacagaacccaacattcttgattggttggttgctttacatattggggaaaattagctgcaagtttcaaacctaaaatgtttagctcccctagtccctagaaaataaaataccagaattggatggggctttgaaattatttaattttgtttgttaatttatttatacctagctaattacagaaaggatttgaagtggtttgtgataaaactacagtacgacaagacaaaaagaaagtgagaaaatccaggaatgggaaaataagtatttaaaaaaaaaatactaagataaagccagagatatcaggctttaaggccctgcacacttacaagtatcagaccgcatatttaaatatcaattcctagcaactaatgcagagaaaggagcttggctagatgttgacttatataaagcaaaaccttttaccttttacgcagtaggaacttaattgttcatggtactgagacattgaagcagacatgaaatataacctgagactttgtgttctcatctataactggagatgttgcatccgatgacctctaagtgcttctccatctctaagtatctaagactcatgccttattcaaacttaatgaacaccttccagtttttaaagggaaaattatctgtgttttcttagatttgcatttctttttctcatcctaatttctttttcttctagacccagtaactcttgttgttctatgattaagtaaactatgcaggagaaaagcatcctggagaatcacaaagaggatttgcactacattggtcctgaaatgacattgtcatttttaaatgcaagtttaaaaatgcaagtttttaacttgctcatatgagtaaatgcatatactcatatttcatagggacgatttgtcacatgacatcatctaattcttttgaaggctcagaaaagaaacagggctatgacattgattagtactggtaatatcaacctcattggttttaatatttttaactccaaagccctctaattgcaaaaattaggctcttagtgatgcatttcctctgaaattatagcagttattactgaaatttctaattgtttttattgattctacaattacattttgaaacctcatttgtaatatttatatggatatttataaacctcattataattatgtaaacatatttaaaatcgtttttaagattttttaaaagtaaaatataatgttaagagcaaagggctatagtgtgaatttgtcttacacgcatcatatgcatgttttgctaatttggatagatttcaagtttttcacactgcttgttttagaaaaataagcaattagaaattaatttagaaataaaagctgcatgatcatcattttgtagtcacactttagtaaataagtaattaactgaaatatttaagttgcaatattacttattcattttgctcatcgtttacaaatcaacaaagaaacaattctttctttcttttttttttaacagtcaaacattctgtgctgtcttcctcgatatattctgaatgggctcacttgttttcactaggctttgcttggtattagaatttgtggttgatgcggctcatttatcagccacgtatggagagattctgaaagatgttttgtcattttccactgtcaaaatgatacattcgcttctgtcctggtttctttgaaagagcttgagttgcacttattttgcagggtaaagcatggaaataaatgatacaaaactaagtaaacagaggggaaaaaacaggactcagaaaaccaaaaaatagggggcttcatttttaagcacgcatttttagactaaggggagataaaataaaatgtccatagctacatttttttaggattgatccggttacctacttgcatcctgactattacagtgagtcttcaattcttgtggatacagatatgaaaagagaagtaactttcccaagttatggtgggagaatagtttatttgatcttttagttttccctgctttgtgttttctgggtgtaatttttcagctattttatttgttcacttaccatgaaaataggaaagaactatgatgtgacactgacacctgtaactcgctaacagagtctgcttattacagactcctaactctaacatgtattccagaagacagttggaaaacacggccacagtacacaatagacttgctttgtaattaaagtcattcttatggaccctaggaaaatcagttattatcataatgtaaagcaattttatcgagcaaaagcttactttttcagaaaagaaaatgtccagtcaaacttgcccattatttatttcgtaaattttttatgttcagatttttaagtgtaaatacctaactaatgtatgtcctttctggagaaatgaaataggaaaaaaaagtataaatcctggcaaactttgatttaaacctggatccgtaacccagaattagcctttcttgattaaacgactttgagtttcagtttcctcattaggataaataaagataatagaatatgaacttcaaaagattgttgtaaggattatatataaaaacagccaagttcttggttcatggtagtgttttgtttttgtttttgtttttattttgagacagggtcttgctctgttatccaggctggagtgcagtggcatgatcacagttcactgcagccgcaaactcactggctcaagagattctcccacctcagcctccagagtacctgagaccacaggcatgtgccactatatatatatatatatatatatatatatatatatatatatatatatatgtatgtatatgtacacacacacataacatatatataatatatataacatatataacatatataaaacatatataacatatataacacacatataaaacatatataacctatataacctatataacatatatataacatatataacatatataacatatataacatataacacatatataacacatatataacatatatataacagaatctgcttattacagactcctaactacacacacacacacacacacacacacacatgcacgcacacacacacatatatatattttgtagaaatggggtctctccatgttgcccagtcttcatggtaggtttctgatgtttctgttaattgctctttgcttcctattagcatatcctttcctactcagtgtaaaatgacaactatgtgctatgccggtggcaccccctggaggcctgtgacagtattttggtctgtcgtcctcagtgcttgcgtttttttctctgggaaattttgctttcacctattgatctccatttttgtgcttttacagacatacaattagttgagtcaacatcatactgtttttacttattgatacatatgtaaactttttaaaaactcactttcctctatctctctttcaaatttgactgatggattaaaggaataactctctctctcttgaccacagattatttcatttatgaggaaccaagctattttgatgtctgtgaatgaacttaaaagaatggttctcagcctgggtctctctatcaaataattgatggccactggttttggaattaaattggagaaaatagagaaatcctgcccccaaattacacaaccctggaaagcaactatataacccctcaaggtccagtcaacagttttatatatatatgtgtatatatatatatattttgtatatcacatctatattaatacatatatgttttatatattcatatacctatattaatatacaacatatccatattaatataataataaatttttatagtttaacattatatacatttttatacatataaaattcaacacttgtgggatgaagaagacaaagtccctgcttgcgtgaaacttatatccaaatggaggagacacacaataaatacatagaaaaataaataataaacatttttataaacactgtgaagaaactgacccagtgcgacagtacagatgctgactaggatagggagggtctcctttagatactcatggtgcgtgcttctctaagagaacttggtaattagaaggatgtagacatttaaaactcacttggaaatgtgttgcagactaatgcaacagaaaccattaaggcccagttaagaacaagcttggagtcttcaaagaatagaggccagtgcgtcttgtgtcaaatgaacaggtaggaggagagtgctgtaactgataagaacctcggaatgaatcctgtgtctctcttgtatttccttaaattctctgtttttaagaaaacttgaaaataaaagattttctaatcttaaaattgtgtttgatttgcttaattactagtactgcaaagccattgcttcttactgtttttatgtcatttctctttgggtttaaatgaatgttgaagggctagcctgggaactgactcacgtttataccatgctcctgagagaaaatataatccaaattgcactgaaaactttggaacatagttctttttcagatagggacaacctatactggagtgattaaaaaaaataaaagcaggtcctcatttatcataaagcctcattactccaaaacctcggtttctactcaagctgtgccgaagattacctttgtcctattatgaagacttgctacacaattccccataataattgatttagaattggcatgttcaatttaattctgggtttgcagaaacttcaacacattaatgcagatggattttgttaattgccacggaattttcatgtgttcataaaagtagtgctggcaaccagggcctctgtttggaaaccctcttcagaaaaatgcctaagaaaggatttttttccccactgtctccacattgagcaagttagtgttgttctgagaagagagaaaagagttagttattgatgggggcattgatccaagtccttcttctcacttcaatattaaaagataaaagggctgattgtgctcatttatcatgctggtctctgttttaccttaaaccctgattttccacatttttctttacaaggcatccttttcatctcctacatcctgtcaaatttacaagttacctttgtgctgatctatacttaattaatttaagagacatctttgccaaaatgtactttaggaaatgcaaccgggttgagaatgatgccttagtttgtagaacttccaagtgaagtgtggctatgagtcagtgtgctgagggcagaggggcactgtacagaggagtgaaccacagagtgagactcacagaggcatcagaaatgcccagccctgccattattgctccctgacccatccttctgcctcctacctcctttcccttcactatatcctctgatcagcagcactgtgacctatctaatatactcactgtgtcaggtcataatcccctgcttaaaaatcctaggaggtttcccatcacctatagtaaggattggcaaacaatagccacaggccaaattgcctgtttttctcaataaagttttattggaacacagccatgcccatttgtttacatattgtctatggctgctcttggcctacaaaggcagagctgagaggttgagaagcagagactgtccaaaaatgtttaccttctggctcttaacagaaaatgtttactgacccccagcctgcatgattgggttcaaacccaaagcacagcacttcccaagatgcttccagcctgccctgcaggctgatctgtagccaactcctccactgcatcctccactctgaccccccgtagataactcattattcctatacagtgctgcacactccatgcctttacactcactgttcagaattctttcgatggcactgcctcaaccccaggggctctgaaccaccttcctttacactgatgcctcaccagcttcccctgtaggtgaattctgtcacagcctttcagcattgctcagggtacatccctacagtcattaggtgccttttccttatgtgtgcaaactgcctcttcagtgagagtggcagcctctgagtgttttgcatgctttcctcagagtccagtctagacctaaacacacagtacgtgctcaataagtaggtgtttaatggacagacaataagtaaggtggccatcctgcctataaactaaacaaaggacatgatggggtaaagcaaatgttgtcacattttcacattaatcgatgcattaatgttgctcattaagcaaactaatctactgtatatgttaacgtcaatggaaacagacagcactagaaacagaagctgcaagcagcaggcccagcagcagggaagtctgagcatggccttgcctgcctagagtgtgccagcagccagcatccaacctcctgggtgtcttgtagcagacctggagccaggcaagtgggaacaactgccagatatcataccagggcaagtgcaaatagatgcctgagtcccaggtctccatcataaagcaaatatctgtccttattccctctaggggaccacttgcccacaccccaggcaacaacaggaatagacatttgctttccgaatgtgcctgccccagaggccagcctctgttttaatatgtattcttggaagtacatgggataggtgagtttgctttgaagggcatattttgactctatgagggacaaatccttttgccaaaattttaacaactaactttaatttaccacgggagatgttggtaaaaattgtcaagacctctttaagttttcagcaaatgccaatagcagcttggacatgattgctgctaagatgcctttaatgagctgaatagtggaatgattgcctttgcttcttcctttgaaaacagacattccccagtagctgctgaacatccccaaggatgttctttgaggatattcctctttactttgtaaccatcacttgcccatccctactgcaaactcttggccctacctacggcaccctgtgtgacatagcaattgctttttctttggtcctctggagaactgttggtgggaccactgatagtcttatcagtgaattccctaagctgtaatagtctcaacaaaggatccattctgcagcattatataatgctgcacttttcgttgttctgctctcgtgtgaccctaaatgttgcttctgcaggaagttttatgcaggtggaggggctaacttaccacttacacacttccaaaatcactgccatcatcttctccctgcctaggcctcatgacatttctgctcaccaaaagcatacactactattccgttcaccttttcctccatgacattgttgaggaaggttgagtggaaataaagaagatggagattctaggaagatgaggttagatggataagatggggtaggagtcccagagttccaacatgaagagtagcccaaactgcttctcaaagaagctacttccagggcctctgtttacatgttgtctttaagaagtaatttaatccagaatgtaacagacatcttgatctgccctgagtttacaaagatcagtgaacataaaaaggaaacacaaagttggatcttgctgcctcaaggtggaagtgtctgggggttgattgggcctgtggatgcttttcttgactggcagccccgggcccagagtgctgtgtggtgtttggtgtcttgtggaaccactttttttccccactggaagctgtctctcttccaaaattcaagtccacaattctccaggaaggtcaagcccagcactggcccctcaccccagccagggcgtcagcctgtgtcctccatcttttttgtcagggtgagcctttatcatggagtaaaatgctctgaaatctgcagggtctgtgtgtgaggatcacacttcccgtgttcctccatatcttcctttatctccagcttgctcactgtcctgattttctagcatctcattgaagcagcttgatgtgacagacattttggaggttttgaattcagaaagaactgggttcaagtcccacctgtgcctcctaacgagctaggtgaccttgggcaagttaatcttcgagagtctcagtttatttcacctttgaaagggaaagttagtgatatttagctcataacatggctgtgaggaatgaaaactactttgacacatactgggactttagtaaatggaaggtataagttgcaggcatgtagaatttcactaatttcctcaatttaagacaataaatgatagaaatgaataaactttatatgtccttctccctattcatgactgtagagttgttatgtggcacttgttttatgaagcattctctctgacattgtaaaaaataatacatctaccacaaccatgtctaaatggctaaaagctatatgcacccacttaaaagcactttgagataagtactgttaagtggaaaatgcccagaatacagtgacaccagtaattcttacgttgttttcaatgttagttcatattcagattaaacaaataatttctgcctgcctaaaatatatcacggtctgttagatagagcctacagttaccctgttcaggtctcaataaatctgtgtggtttaagggaagttgggacagactttctaaatggagtccattagttcatgattcttgagagttgactgaatggcagacttccctggttttgtttagtagcttctgcctgtattacccccaagaattgggttatggacaggacacaatgggaatttcattttgtggaggttaagtgtacagaatatggcatcaaatcatgtaggttgcaatcctggctgctccatataccagctacgcagtttcctcatttttaagataggattactcttggtacttctgtcatagggcacaggtaagagcttagactatcgccaccatcagcactatcatcgtggaggccaggtgcctctatgatgtgtctatttgaatatttagcacttgtcctcaaacccactgaccaagagggcatgttaaaatggccacatcagaaaaaagaaatggtagagttagtgttctttgtgttgctcttctatatgaagtgtatgtgtatgtgtgtgtgtgtgtgtgtgtgtgtgtgtgtgtgtattagcttctatgtgaggagccacactaaatgctaggcactgtgctaagaactccacatctatatttttatttaacctcaagtaattctgtgagaattctggatacttgcaagagcttattttacaaccaaagaaactaaggctcattgaagaaagtaacttcccacagttgccagagttggaattctaaggttcatgcatttagtggatttgttagaagctatatgtaattggcctgcttatctctgcaactctaaggaatgaaaaatcagttcatgagcccaggataaagtgatatgtacaagaaggtttctttcgatcaaatgttgcatatctgaggctcatgaatgaagatgagaaaataaaaccctaagtatacattttagaaaaagtctactgtaatttgtattgtgttgaatgataaaagttcttttactgtatagcttttgttcaggatttaattacaggaatactttagcctctaactgtggatcattgtttggttaatgtctgatggattgacatttttccagtatgttggataaaacggaaacctcgagaattgcatagtcctttaggcaaaagaagacaggatgctagaggtttttgtgatacttatgaattaaaatatgcactgatggtggagtattcctccaagaaacccttaacaagtaacggtttcataattcaaatataacccaaaatacaaacatttcaaaggaaacaaaaatgttgggtctattcccaatgcatgtttctaagtctcttagcctgctctcggctttgagatagaagcacttcttcctcttccatggaaaccactacaaattggagtattaggctgggcgcagtggctcacgcctgtaatcccagcactttggcaggctgtagtgggtggatcacttgagcctagaagttcaaaaccagcctgagcaacatggtgaaaatcccgtctatacaaaaacaaacaaacaaacaaaaaaattatctggacatgatggcatgcacctgtgtagtcccagttacttgggaggctgaggcaggaagatcattgagcccaggaggtcaaggctgcagtgtaccatgatcacaccactgcactccagcctggtctgggcaacagagtgagaccctgcctcaaataaacaacaacaacaacaacagaattggagtattagtgactaagatatgcatgcatctgacaatctttgattgactctctaggcctggcttccttataaatttctttgtttcttttagttttctatggaaactggatcagatcaaatctctctcctgagatccaaaggggtctacagggtgtgtcagtgacagggtgacatttcaccagacttcttggtaatccagtagctgaataagttggattgaactagatatctatctgcctttgctgaaatataaatgaaggcaaggaaattcggagtttggtcttccgattcatacccctagcagctgatgtaatatttggacttggatctcaaattcatgaggatagaccctaagaataagattcttctagctgtgggaagaaacaaagagtgattagaggctgatgtgtccctgagagaggctccatgcccttcttgcacacaggctgaggattagggataggacaacaaggggatggcaggtagatttagaaagatgtgtgcctcgctctagggagaactcaggaagcagcgcaaccccagggaacaatgactgcagaatccgtcctgaaggtgagctgaggcagccccttagaactccctgtgtccataaattgcagcagaatagaatgatttttgtgcacctgagagtaggatagaggggaagaaaggtcccagataacctcaccaggttttctgtggccctactgataccaggaagagtacagtgatcacagatattagagaaagtggatgaagggagtcgcactgatacacggtggctaagaaaactaactttggagtcagacaatagatgctcaaaatcccactcctccacttactagctgtgtgatgtttggcaaataaacctgtctatgcttcagtttcttctttgtaaaataggtataaataatagtaaagcatttagaatagagcctgccataaaataaaagctttataagcatttgctattattgttactattacattttatgaaaaggagaaaaagtacatttctcatgcacctgtatttgaagatggagactagggatattggtctaaaattctctttttttgttgtgtctctgccaggctttggtatcaggatgatgctggcctcataaaatgagttagggaggattccctctttttctgttgattggaatagtttcagaaggaatggtaccagctcctccttgtacctctggtagagtttggctgtgagtccgtctggtcctggactttttttggttggtaagctattattatctcaatttcagagcctgttattggtctattcagagattcagctgcttcctggtttagtcttgggagggtgtatgtgtccaggagtttatccatttcttctagactttctagtttatttgcgtataggtgttgatagtattctctgatggtagtttgtatttttgtgggatcggtcgtgatatcccctttatcattttttattgtgtctatttgattcttctctcttttcttctttattagtcttgctagcggtctataaattttgctgatcttctcaaaaaaccagctcctggattcattgaagatggagactagtacttagagtctcctcattcccaaacttgtaggaaatacaaagctacagtgaatggaattgaagtattcagataaatttctgtagatttcaataccacctcccccttttttttccatgagcttttcatttactacttcacataattttttgatacatgaactatccttataaccttgcgcaggtgacttaatttctctagatctcccctagagaagaaaattcctcatctgtgaaatgaacaacatacccagctcgcagagttgttgtgaattccaaaacaaatgaatccattgaatatgagatgtacagtaaacgtagtgctcggcatgcaagcagcattcaacaaactataaatgtgtttgtgttattattgtttgtactcatcttaatttctattcaaccatttttacataactgtaatggaaagactaaatctagaataaagttgcccatgatcagtgagatgcactggtggcctccatacttattcatccactttggctccaaaatggctccagcctcccgtttgttggaaaatcaacagcctgtgacatgtcagtgttgagatgatttgaggagtgccacagtctgcttgttgattacgactgtatatttgccaattctttgtgtaattaaatccagccaaggcctcaggtatgttcttagccaggtctgatttatttagatgttttgttttaaaaagaatgccaaggtaaaatttgttttgtttcttttgcaccacaaatgccttaaaaatccaatcttggtatcagtgacggatattgatatactttgtcaaacaagaaatatctgcagctgctagaaataaaaattcaatgattttcagcagactttcctaagataataatgtaatttatctttcagagaatattaaaggcaaaccttgaaggtgagggcaaaaagccattttgtgcctcaaattagaaggataatttagaaagaaccacatttatattcatttgaatttaacaacctggaatggcaacgttcacattagtgattatttctacctaaataatcacaaaaaaaaagaaaagaaatgattatattttctgctttgaaaattagacatacttaatattgcatatggtgaaatggaggcagtaaaaccccaaagaaccaaaatgtgtgaggaatgatatattttggttaatagagctttccatttgttgtatttaagcaagtaatgtttttacagttgttggtaaaaacctttttaaatacttgcgtataacttccttgtcttagtttaataaaatctgcaaaggtcactgtgtgaatagtagctcagacctaatgtaagatctggggaaggattgaggctgctatgctaagagcgtttatatgggagttgtattttccttgtgaaggtggtagtagttgtcgaaattttgctttatttgtataaatgtaatattttgctttatttcaagaaatgctatgagtattgttgtacttgtagcttctaagattatggtttgcttttttcttaaacttgtgagtatagtaggcatgtataaaactgaactaatggaaatttccaactagattgaattcttgaagatgtgctttatattcagagacattgaaaagggaaagtaggactataaccaaacactatcttctggctcttcactctgtgaggatctggtgacatgtagaagtgtcctggctaaattgtaaaattgacaaaattttgctttcattacttctccccttcaaactcctctttctgggttctttgattctccccatctaccaagaaccatcaacaggtggctttcttgcaatttatttgaggggaagagcaggaaaaaaacgactcaaactcttgcataatgtcacagagtggttacttcctaacttctacttctgcagctttagacccacagaggtttgttcattttatctatgaaatctgctttttaaattaatcccctgctgacaagaagcgtacatgagcattgtggttaaactgtctttaaacctgctctggaactccaacaacttcctgcagcatggtatgcactgaagtcacttcactgctaattggcctgttctctctccctctccattttttgggctcccacgtgggcttcaaagtgagccacagctcttggcacatcttcagactttgtttggtctaaaaccaagaatggaaaccttgccaggagtttccaatttgttgccctcgggcatcttaagatctcatcaaagatgcagtatacagtcacatgaagaagtggagtaacaacaaaggtagtaaatgattaagtgacaaaatgacaaatgtttcaggaaactagaataggaaggcagtggcactgttaggggagggatgcttgagcaagagtctacagatcaggtagtgtggagtgaagagggagaagagatgagaagggtgttccagttactggggcagacagagcaaaggagggtctgagagtagaaatgctcaggaattggggagacagatgggcatggggagaataaaaagaagtggctctggggagccaagtaggcctggtgtgatgactctgccagtgccaagcttttacagcatgcaggactaagtaagcaaaagaggtttggttttgttggtttgttttgttttgttttttgttttgttttgttggttagttttggagacagcatctctctctgtcacccaggctggaatgcagtgacactatcacagctcactgcagcctcaacctcctagactgaaacgatactcccgccttatcctctctctggagtagctgagaccagaggtgtgcaccaccacacctagctattttggggtttttttacttgtgttttagagacaggggtcttactatgttgctcaggctggtcttgaactcctgggctcaaatgatcctctcaccttggcctcccaaatgctgggattataggcatgagccactgcatccagccaaaagagtttattatggtttaaaagcacctcatgttccttaaaactttgtcttcttgagccacagacccgtcctgggaacattcaataaatggccttagtactaaatgtggtaaaccacgagttgcgacatagtcaaataaaacttcctgaatttacctgctgtactttgtcgcttgtttcctcttttcccccagctcatagacattcttgtacaccctatcaccttcagagagtggctttttgaaagcgaccttgtggtgattgctggctgctatggatggctagctcaccttccagacagtcattggatccccaacatggtggcaagattacttaaggcaggcactgctaggttttcttctgtttcataggaaaaaaaaaaatttgaagtctaggggaaatggggaaaagaataaggatatcgctaaaatcagggaagaggaaattaatttttattttcagaaatgaaaaatagctttaatgaaaaatgcaaaaaaaaagcttttggtacattttctaaatatgtctttatttttatttggcactccgcatttgctcttgtgcttaacatctgctctttaataatttcatgcaatacctcttgatgctttcaggagatatcaccctgacttccgccctgatgttcctacccccaccatggcctcagagaaccaaggctgtaccaggaggtgcccagtaaattcaagccactgactgacaggagcctcctcattgattctggtattaatcctctgaaaacataattggagcagagggatgcaatcagtagtatccattgggcaccacaatatggggacagctgattctgtgcatgccattagctcattattacactaactactgcagttttagaagataaacctcagagccttaaatggcatctggaggctgagtcagttctccttggcaatgcaattatctcagcttgtttcagtctgctgagaggtaggaataatatttcactcagtgttccattgcattaaaatgttttgatacctgtttgaataacattgccttaatgttaataaatccataatggtcacacaggcaggggtggtgtgtgaatcaccctggaagggatgttcattaatcagttacttggggcttttttctttattcattccctcctagggtttgtacctgtgaggaagcagcctaccttctttgcagccatctagcatctatattctagaatcatttttccctatgatggtcaaatccagattatctacacagaagaataaaataacctgagtaatccaaagtgagtcataagtttttaaaagtctgggccaggcacagtgtctcatgcctgtaatcccagcattttaggaggcccaggagggaggatcacttgagcttaggagctcaagaccagcctgagcaacatagtgagaccccatttctaccaaaaatagttttaaaaatagccagacatggtggtgcatccctgtggtcccaggcagttggtggctgaggtgggaggatcctttgaacccaggaggttgaggttggagtgagctatgatggatcacaccactgcactccagcctgggcaaccgagtgaaaccctttctcaaaaatatgcattgtcctttggaatatgttctgtattcgaacatggatgtagctaatgtttgattttaattcaaaaaaaagtgatacaactattgggtggagactcaattttttcaagaagctacctatttttgctttatacttcccatgcccaaccctcttggaaacaattcaagatttctcttttgcaggcttattctggattggacatgagtagtaattttggaagtccaaaagactctgggccttgaagttaagtaggaggtgttgagatgtcagtgaaacacctaagatggtgggtgatgcaactgtgaattactgttatgtcttaataaaccttaaaatgttatttgactaagtcagaagcatatgctatattgctagtttattgatgtgtgagtaccacataaaatcatttttgcaaatgtgtcctttaaacataagacagagcatgttattagacacacggcataaacagcatcctagtgagtttgtcctctatgcaaattgctgcttgatatttggcctcctctctataaagaattgccttccgcactgactgagtgagaaaattcaacataattctgatttgagatccatgagaagtttattatacctgcctggtgttctgattatgaagcagaaaaaagaagatatgggttatcattgacagatcctcagctgtcttttgaaatgtcaaatcaaatggacatttttgttttcaaattgcttgacctttatcagaaagcagctctggacagaagatgatccttttttgagtcactgtagagcacttgagcacttatacaaaggagagattttattcacttagccagaattgagcccctttggaaaagccttgaggaaaactattgtgatcaactttcactattctttttacaaatacctgtgtggcactacaatgcagtgtggatcaggccctggaacgtggtgattacagacatgctgcagagaacttgtcacactggggagcgataggaaacctgctcagaaacatccaaggcaggctaagatggctgccatggggaagacactggccatataggctgcatgaactcagttgggggagagtcgtgatcagttggcttgctcagagatgactaagcagaaaaggtggtgtggaactgtgccctagcggatgggaaagaagggcagacatggtaggggccagagtaagaaccaggtcaaaatccgcccagcaaattttaccccctctcttcttcacctctcctttataacactgtccaattggtcaacaactcttcctttataagtctcttgaaaggcaccaaaacccccttttgggtgcatctctgctaacaccctggtctaagaccacactgcctcctaaacagaaagctgaaaaatcaatcctagttgtttttctagctgcactatttagtatggtgcctaataatcttcctcaaaacaccttttctactatgtttatttctagaaggaaggaaggaaggagaaaaaaagagagggagggagggaaggaaggaaaagaaaaggaaggaaaagaaaaaagaaaagaagaaaaagaaaaagaagggaaaggaaaggaaagaggaaagaggaaaaaggagaaaagagaaagaaaagtgaagccagaccaaaccaaacaaaccctgcaggatttttctgtttctgtggggtctggcataaactcttgaagctgacatgccctccagtgccccagcagtggttcactcctctttaatttcttatgctttcttgtcacagatttcttttcccccaactttgtgtgttctcaatttccctctctgcgtatacaactctttcatcctcactaaaacacagcaaagacttccagaagaatctacacagaagccactgcttctcagaactcttctcaagtttgctggactctcctcttctgtgcttataaatcggccactgttagtgtgacttcattttgtcttctaaaccgcgttgcacctccttggccatggagaattaaggcgaaccttaatccaatgactaattcatggctagaactaagttagccacctgcctggtagattatggtgtccaacatagagaactgagccaaagagatagtgctttcctgcttagaaagagaaggctgcttagaatagacagcagtgtgggtgataaatagttaaccgagacttttggtgaacactaaaatcctaattaaatatgatttaattctgcttatagtggcagaaaagggattcttacaggtcttttgtctgattacatcacttgctacattaagttcattaggaatattaggcaatgaataaaggccaaaggaaatgaaccatttttaatggatgaagaatagtatggaggccatttactagccaagatgaatagtagcaataaattgtggattcatttcgttgaaactatttaaatacatgtctgttgcctgttctattcagaagcatggatagtagggaatgagatttacagtgttatttgggactacttgttttttgaaatactgtggttcataatcagataattcttaaatgatagacaatgaataatgttttgagagctcagccttcttatctagttgggatgagaagaatgtttcatgcatctttctgtttcatttaaataatcaggtggtttcactcataaatggaagggtagctatttcaagccggctaccttttagaaacacacataaagccttcattatatggcagacttggagcctgtgtttcctgtagccaaaggcttttgcaaagatttgtggctatgaaagataaaccttcccaaactttaaaattatgcagtgttttcaaaaagatagccattgcacttttgtgggaattttaatttaatagagaaatgaaaggaaagcagtcatatcttttcatcattgcctaacccctttaaaagtatatattaaaattcatactatttcgatatttatgcctatggccttctaaactttttatttaatccactcccctccccaacccccaggagaaaccacagtgcagacagcaattacgagccttctggtttctttcacaaaatgggctttttaaaaactgcctttaaaacactctccatgtaaggagtcctggtccacgtcatttctgccttctccatagggtacatactcactaggacattagggattgaagacaatagaagtctactgttcctggatgtgttgtttctagctttcagctctaaaaagccaaattgtttctaattccatattaaaaaaaaaaaagacaaaaacatgaaggacatctgagccttggccttaggcctagttttagagattgagatctggtggtagaggctgtctctatcccagctcaccagctcccccataaacctcccttggaaatccctttcaaccttatttcttctccataccatcctggtgcagccctaaggtgtctttaccattgtcctgctgcaagccatctcactgcccatctgacatctgcaagccgccttcttcattccatctagccaccatagttgtttccttacaaagcaactggttatctctcctatactaaagcctcaaagttgagtatcccccactgcccacagtggcaggtgcaaattcaacatcttggaaacatgttccttccacagttgggccctgagcttctgtggctgagagataggcatggaatggtacaaggagtataacagagaaaataaagaaggagccccacatttcacaagcctagattctgtgcttgacgctcttctatacattattttatttatttaattctgtaaacaaacctgtgcagggggcattgttcatctactcagccttcctctgtccattcatccatccaaccattcatccatttttactcatttagtcattcaacaaatatttattgcatctcctatgagcccagtacagctcaaaatcaaagcccgtgctctgttatagcttatgttctagtaagagagatgggcattaagcagtattagcatctgcaatttctcatttaagtcttctataagcagagaagagccacaggacacttttagtcacttactgacgtgttcatggttgttttcaggaaattttaactcagcagaatgtatagacgagaaagagatgggaagagttaaggaaagaagacctgtggggaggaactgcagtaattcagagaagaactagtgtgggtctggagaaggccagggcagtgggaattatgagaaagggtgaatattagttatttacagatgaagaatccttgttttttggccactgatgggatgtggagagcaaagttaaaagaaactcaaaaacaactccctggttttaagtttaaagaattgggtgtccggagttccctttaagagcatgttttgccgagtggtagaaatggaaaaagatgatttctgtgctatcatattgacttaaaacatcacataattagagagacacgactataacattgcacactggtctatagcattgtttgaggcatgaaatgagtatttgcagtttctgacaatacaaagagaacctttgacgcaaaggtgaattaatttctgctgggggagtgggagatgatgaaaaacaaataaacaaacaaaacagccatcactgcagaaatctacagttagtagagctcacccttttaatatttagggacagcattttaaaaaactctttctctgcaatttctgatagcttttgccttgttttcatattggccttcactgccagccacttccctcaattaacatcctctccaaatcaatcattgatattatacttcctgcaagggggtaaagagatacaactttgcatgtttcccaaacccccgaggtcacatgtccatggagaagtagtgtacagtgatgatcttgaattctccaagcaaggaagaagttctctctctctgtgcatgtcctgagtcaagagggcttttgctgtgctgtgctgcattcctgcctagggatttagggcaaattgttgaaagagaacttaggctgaggttgaagagaaaaggccaacaagcggggaagggtgagtgagcaactgatttggatatctgcccattgagatttcagtatttgccccaaatggcctcattgggatgtgagcaggctgacctcctaggctcagggtagatgcttccagccagtatgggtacacccatttttggaagagacctaaatgaggatgctctagaaggctgtaagcaaaccactgcctttacttgtggcttgttccttgttttgatttgactgcttgatttccatttacacacaacttttttttgtatatttgtttatgtgtgtaaaatatttaaactatcagtaattaattggtggttccttcttccctggagtctgtgtcaccagtggaactctgcattagtttttcgtgcccatacaatcagttaaatgttcagtgaaggtgtccaaagtgaaatatttctctagggttatggccaaactcagaattgtttttctgtcttctcttccccttatatcatgatatccaggcttatcattctattattttcttttgaagttagctatgaattaactgtgtggccaatgattttgtacatttatctaagtgttagagttttaaaaagcattttaaaatctaacttgatctcaaaacaaacctttgaagtataatatgtgtgcatatatgtaccttcacaatttataggagaaatggaggctgaacatttaagaaatttttctcctggggattagtctaataattggcagagataagaataaaggccaggaatgtgtatgtttaaccaaggagtgtttgcaatctattgcaaagggagagagaagaactagctgagcaatttgcagactgaattctttgggatcctgatgttgaggaaggatgccttggagaaagaggaggcggccggacacagcctcctgtgcctcacccccactgctaccaggacagtgctgtcgtcatctgtcctacataaggtgactccctgtatgatttcatttggaaaacataaagtgtgctattctagctttttgaaaagtttaaaaaccatagcactgcgttttagaatactgttcattttttgcataccagagttctgagtatcagattctgctatattaaataactcagaatttactcatttgtgaacatacctctctgtacttccaagttatctcgttaccacacacagaaatgtaaaagctttaaacaatgtgttttttaagtgcttagtgacaaccctaaaatatttccaaaaggttctatggctcagacagactttgtgatgttattctttaagaaatgcaatggttgataatttgcatttatgatatttcctcataggttcactttcttagttaaggacacactatctcacaagagtgctctttaaagagcaactttttaatgcctaagcattgatttagagttggagctgggctggtaccacgtggaccgctcttactctaaaaggaaaattgagaccaccatgaaagtgttttgattttactaaagccatgtcctcaggcaagagggacttggctcagtcaggtctgagagaagtacatcaaaatgagtttgaccaagtggaaaatggatgctctaaatcgttgtctacagtatttccctgacatctagatcaaatatgtacattattacactttgtgaaatcctgggaggtaatttaacagaggtacttaattctgaacctgaggttgtgcaataaaaaggagagggagggggcagggaaaggaaggatgaaagaattctgtagactcggtgggctgtagtggagagaatcctacactaggaacagggaaacctaagttcttgcccagtgctgacaccaacaagctctactaaattcacttaatagcagctgtgctcctccaccccctgatcaatcaagtatatattcctgaccatcagactctgcagagctgtgccttccacgctcatcactgatatacttctgcctacaggataatgtcaggccctgtcaaaccaacatctaaatcacctgtttagcttcctttccctccctccctttatttccagccacacacgaactaaatgctcctcctgcctgtgtcattttatacacgctgggatgcttatccccatgtggcatgatttctctgggctcagatattttcacatctgtaagacattccctacccacttaggttaagtggtaaaacgtgttttaaaagccttacctggtgattagtgatgataggagtggtggtgcttctagcagcagcagcagcagcagcagcctgtgagatgggagaaccatcgtcaccactgctgttggacactgtgccaccaggacaggtttatattgaaaattctgttattgaggtttcctctaacctctcactgattgggtttttaggaggattcatctttaccattgtatgcatttcattttgccccaccttctcttaattgagttattacttctacctttcattgattctgttttttatattaatgctgagactaaactctgtcaggtgtcaaggccaaatagacttaactgccaacagtatccctggaaggtagaactgatgccactcttgcatacctcaatgcaaagccatagcaataatgcagcttcccctggcccataggtaccactgggcctacacaatgggcactgtgcctcagaaatccaggaccatattcgggacaccatttttactagcagagggaaaaatgaagccatgagttttttttcatctgtcctcacctcttagttgtccacaagtacgtggaagtggttagaattccatatgttaattgcacatttaatgaactctgcaaggcccagtaaaaggagcactgaatttggaatgggaagatttgcagctctgcccacgctggttggtcaagatgtggtcatcaaatcctggtcactctaaatcacagatttcttatgagtaaaacagagataataatattgatcctggcttctggggatcacatgagggaatctatattgattattttttaactccattcaatagatccctaggatgccaggaaagtcccaggagggcagctttaggagaacaagggaaggatgaggatgtaaggcttgggcatcaccctgtcatctcccagaatccaacagctccactggattcagcaatagggtagaaatttctatagtgtaaactgaggcacgtttgctctgtggactcttcataagtaagccaggcttctttactaaaactggtgagaaaatagaggctaaaatttttttttaatctctttgctgcaagacttttcagaacctttactatgctggaatgcttgtagatttccaagagaaacaatgtacagtctcctttatatttatttgggcgcaataactatttctgaggagcatttcataggagtaatattccttgcagactttgttgctaggaaataagagagcataattcaatgcttaatgtgtggtatgcatgctgtaagtgataagagtatggcctagagtaaggttagtggagaaagggactagtcctcaaaggacccagggaatttagaaaggtggagagcagaagagaagccatgaacaagtcagagatcgttgttacaaatgtaaataagtaaataatgacatcaggagcaacaaatacctgctgaacactcactatgggccaggcagatgggtcaatgctttacctgcattttctaattttatcttcttgacataggggctatcatcatctttatgttagagaggaagagaaaagaggttggataatctgttcagaataacgcagctactaaggagcagaggcagcatttattttattttattttacatttatttatttatttatttatttatttatttatttatccatccatccgagatggagtcttgctgtgttgcccaggctggagtgcagtggcacgatctcagctcactgcaacctctgcctcctgggttcaagcaattctcctgcttcagcctcccaagtagctgggactataggtgcacaccaccatacctggctaatttttgtatttttagtagagatggggtttcaccatgttggccaggctggtcttgagctccttgtaatctgctggccccggcctcccaaagtgctgggattacaggtgggagccaccgtgcccaaacagaggcaacatttaactttgattttctaacacaggaaactctgctctttattaaaaggtcttgcccagggagatagccaggtaccctaattgggaggctggaatggtactggttggaagtaacacaggaaagactgagaagtgctggattgcaggaaatcttgagaatctggcatagagcacagactcatcatgtttagggccctgcatgcagttgtgtgcatatagctgtgtacttttacaacgtagaagacattctgtggaggggcagataggggctacgttgatctagaaggggattcacatatttaaaattcacataaaaatgtcctaagggttaggagtggccctgctcatgttgagcaagaatgaggctttcaaatctcttgtttaccatctcctaccatgagttcctatcacaaaagtttatcatggtgagcttaacagagacaacttaaggggaaaaaaacttttagagcacttactggcaactaacattcgctgttcttcatttgtttcactcacctgctatggtagaaatcttggttttggcacttaatggtatagtaaccaccagcctgggtcggccaaggagtggcatttggaaagaaaatcctagaaagcctatcaccatagatcagctatggggaagggcagagttgttctacttatagattttttaattatattaataggtcagctgcatgctcaatttatttgatcatactatgcatttagaaataactcaaacaactcaagtttatcactatgtttatttgttttttttttttaaacaagcacagctaaagaatgaggacattttcatatcagtggttttcaagctaattcaggtggtggaacatctggagtgtaatacaatattgagatatttaattactttttatatttaacgccataaactagagctacacataatagcaaagctatgtttgctttgtatggagcaatataaaattatactcatgaacatttatatccactaaagaataagtttccataatccattgctatttagaagttgctctgttgtgtttctgtgacttaacagaaacctattttgtgaataaagtaggtttagacttgatatagtagcttcctaatatttaaggaaaaacttatggactaaattattttaacagtatttaattgtttgattttgaagagacaaatatgttttaacatggaacttgggtgtttcacctgtacacacttttagaatcatgattctagatatgcatatttgcagaaagtgtattaagtctatcagtcataataatatttaaaatgatacattttgcatatgtcatttcagaatcatcataacatccctatgagaagtgcagtaaaaaaaaaaaaaaagaaaaaacaaaaactgaagcacagagaggtcaaataacttgtctagaaccctacagctcatttgtaagagagttgtgcttcaagtcacaacctcggagaccacactcatacaaaaccatggcacttatggagaccaggtttctccatgttggtcaggctggtctcgaactcctgacctcagggaagaccacactcatacaaaaacatggcactattggattcaactccttctgcttcagcccgtgcaaatttccactgcgctaggtatctgatcccagaaatgaaacatctaacaggagagtttccaggatgggtgtggatgctgaggctgggttagtgttcttcttgtgggcactaccctatttactggaatgactaaaagtccagggcactttggtaagttgctttgaaatgtctgtttcccattaattgcgctacctccttgccttccttatattttcactctgttcttattggaatccccatgccaacctgcctcttagcatcacccaagagttgagaacttaccctccccttcacttgcctatgaaatcttaccgttcttgagtcctatttcatcagcatcatactgaatttttgacaatgcatttgtggctagtaatgtttcaatgttaccctttataaatctggtactttgtaattctctaaatgtggattttcacatctattaccatttgaaatagtggagctagagctatttggaagcctgaattcatatgtcagttccacatctcaattgagcttgttatttagctctctaagcctcagtttgcttctctgtgcagtggggatggttacatctagcttacaggattaccgagaagattgaaggatatgatatacatatagtctaacataatcaattttcaaaaccgagagactgtgttaattgtaaatgaactcaagtgtatccaagtttttccttttccaattccatcaaaactttattactactctaacttgaagatattataaatatctacatatttatccatgagaagaaacaggatatgagtttacatgctttactttaaatctgattagtagcaactactactaatttggtgtttttggagagactgactttcctgtactctcaaaaacatgccatgtagacatgtgttcagtcttgcctcctctgcctgtttggtgggtggtgctgagggagaggaaacaagacccctttccctgcccaagccattaggaagatgcctttgaaaattttctgagctaaagcaaccttctctttctattaaagtccttatatctgtatcagctttctttaacagttctcattagagatcagatttaggaggcttggggaatccttttattctatagccagaagtgagagaaggggtaaggggaggtgtattcactaatggagtcctagaaggtccagtgcaacaaccctttctcccaacattggaggaggtgaggacagtgagaggaccactactctgcaggtcaggccatgggttcaagttacacacgtgctgggagattcttgcacaattcctcaacctctcctcagtttcgtactctatgagagcctcagacccacttcattaacttgtaatgttcaaaagagggctgagagcagccacttgaaaatgctttatgaactgtaaaattctctagaactctaaggaatggttatgatcatggggctctatgacccagatctacagccttatgtaaagtccctgctcctcttcttgctgtcccaggaacagatggaaaatctgagtccttctgacttcttattttgacatactgtgtggtctggaaacaaagcttatgtacttttgcagttacctctttggaagaagtgtgaagcagactaggcagtttagaaagcacagttgttatttatgtttccttatcgctcccgcagtcaccccactgtgctcttaaggaggatttgggagggagaactgaacccctgtggtgaggagtaatgagtttccctagcttttgcatgaaccagctctttggaaagctaaccttctccccaggcactcactactaattaagaggaggggtggctgcattggtagatatctactgaagcagttctgcgattcttttcatcacttgcacatcaacttctcttcttcttcttaactctccgtgagtattcatgcatgggaggaaccgaggaaacagtggacccagattcaaggaaaggacagtgtagctgtaggactcagtttccctccatgtttaggtagagggtctacagtcagactgcctgggtttgtatcctagccctgccgctgtctgtgtgtttttgagcacgtcacttatgttctttaatactcagctttgccacctgtagaatggaaatggcactaccaccctcagtggggctgttttgggtaccagatgagataacttatgtaaacaacaagatgcttcgtgtgaaatcacctctcagtaactggcctctgtgggtattttaatcagtcccttatttagcacatgatactgactatcaacttttgtgcagaacaagatgttagcatggaggagctggcttacagaaaatattttagactttccgagacactgaaatgccagaggaagctggttctgtttaaaacaaaacaaagtgaaagacatacatacaaactatggcattggagaaggcatcttgggtgggatggaagttgtcttttactgtctgacatggtgttagaattcagaggacagaatgaaaggcagggaacatcccatgatccaaagcttacctgagtatatggtacttttataactgcatatccttgcaggatctgcagtaaatctgataaacagaaaaggagatcttgagcttctccccacacctccagctctgcatctgggccttcaatgtgattattttactctgagaactgcagccttctgtttttctctcccccaacatcattttaaagcatagctttccaaatgccatttctcttctgaagccaatatattttttacagttggagttagctgcaatgtctttcacagctcgcaagtcattgggaagatttgatgttcattctgctaaaatattgctgcctgaagactcaactgtgaaatgcagctgtctagtgtgtttgtacttcgcaatattcccaaaacacacaggcatgcacatgtgcacacatacatgaaaatatatgcacattcacacatatacgctttttaaatatatatttaaaagtttttaaatgaaagcctgtttattatgggaggagattctgcacaattaaaggtatcattcatcctgagcaattttgaggatactagaaaaaatgtagactatacaaagctggtgtgtgtctgtgtgtgtgtgtgtgtgtgtgtgtcagagagagagacagagagagacagagattaagacaatacactctcatctaagattatttacagtctaacttcttaagccatgatctctacgttggatagttggaaacattttataaaagagattatttatagaggacagacttgggaaacagaccgtcctaggttcagatgttggctttgttactttacaagttgcatgaacctgggcaaattgattagactcatcaaggtatactccttcactgataaaattgccacctacctccaataacttttcttagaattaaatgtgattaatgtgattatataaataaatgttctttgcacaatgtttgacaaacattgagaaataatagctccctaccccttctcatcttttatccgtgagcagagtaatgaaatatttctcacccttctcacatattccctcttacaaagccatggagttccctaatttgagtgtcacttgcacctcccaggacacaggttagaagactgagacagaactcaagattacctttcagcagtcctcattaactattctgtaggccaattgtgttaagtgattattattattattattttgagacagggtctcactctgttgcccaggctggagtacagtggtgtgatcatggttcactacagcctcaaataatccacccacttcagcctcctgagtagccgggactacaggcacgtgccaccatgcctggattttttttattatttgtaggaaaggggtcttcctctgttgccagggctggtcttgaactcctaggctaaagtgatccttgtgtcttggccttccaaagttctgggattgtaggtgtgagccatgtgcccaggaacattaagtgattttagcaagtgtaataattcctaaagattttgaaattgtcatagttgctctggatggtctagttaggttggtgcaaaagtaattgtggtttttgccattcactttttttttttccacaatcacttttgcaccaataaagcagttttagaatgaaaattctccacatttcattttcagcattgtcttttggaaaaatagtgggaatacatttttggaggaatacatttttgcaactttttccagaatctttgctcttgttcaaaattcatacaaaaattgaagatcttcgaaatctctgtaaaattgagggtctccatatatagattttcaagtgtggaatcaatggcatcattgaggtaaaggcttaagtggaatatcaccactataatccttgctatgaattagattgccagatgaaaaacatggaattcactgcctgtcacaagggacacctccccactccaaacagaagaaacacacctcttacagactcatttttacacccctcaagagcaaatagtccatgcttattattatttaaaaaacctagagtccttccaaaatgtaatgcattataaaagccttcacatcatggctaatattgagaaaagattatttatattttcaactcagaggcagagcttggtaaaatgctatagttgtaaaattttgtggctatgttattctttttcaagccgaatctcaggcagaatctacgtatatagaaatatgacagaaaataaagagttgctctagttgaagttggaggcttggcccataactgtttggcctttttcttgctgccttggcacatcctggctttatccacacccgagtcaccacctcagaaagtgagagtcacacagtacatagtagagaacctaccagtagagtagaaagagatctaacttcaaaaaaagaacatcaacattctagcgctagttctgccaggaactagggagatgagtgtccagtgagggagttagatgaatgatctccatggtcctctgttctgatgttttgttttttcttgttgttgtttgttttgttttaaattattggttttcatcaagtcatcatctttgttacctacatataagcaataaagttgttaagagttctttctctgtttttcccatatatgctttcaacaaatatggatttaggtgttacgatgttccagtatctatgttttgtgataacatgtttttttagaaacactcattggtttcattttaaagtagttgaaaatgtgatcagcattatctttacctgttttttgcaggtgtgccatgtttgaataagattaaccatgatgttggcagcagaggatgggggcacttcagtacaactgaagcagtcatacaccacttctgattactggggcgataacttgaacacttaagcaattgctagagcagatgtacgtttacaggcctctgctgttgtaaccactgctctggattccagtgatttgagaccagtctccctccctttgtaacctctctaaaggcaggcagtgtctcattggtcccagggctctcattgcctacgacggtgccaagcagagagaagatactttgtccatgtttgataaacacatgagggttcgatggctgtaatgagaggaaacccagcagttagagtttcctattcaaaagttccttccaattgccatatgtgttgtcttattgggaatgcattctgtcaagataatggtccatgagaggctgatgaagaaagagcatagcaattcttgaggcaaatcttataaagctgtcttgttgcctcttgagaaaaagggggctacatttcctaagattctgagtcaggctgtccaaaggtatctgcccaccaaagtacctttctatcccagggtcagcaaacattttctgtaaaggactagatacaaacattttaggctttctaagccatatggtctctgtcacaactactcaactctcctgtcatggcatgaatgcagccatagataatatgcaaatgaatgagcatagctatgtttaaataaaacattatttttgaagtcaaatggcaggctggatttggcccgtgggttttagtttttgtcgattcctcttctagcttatagtctagaagtttcacaaagttctcttaaactccaatttagtctttccttatctgccactcatgagaatagataaaataaatgatcacaggatatttcttggccttgtaagatcagatattcttcctgttccatgctcttctaaaatttaaaacattctcgacgaggcacagtggctcacgcctgtaatcccagcacactttgtgggaggctgggaggatcacttgggctctggagtttgagaccattctgggcaacataatgagactctgtctctacaaaaagtttttaaaacttagccaggaatggtgatgcacgtctgtaatcctagctactcaggagactgatgggagaggatcacctaagtccaggagactgaggctgcagtgagctatgatcatgccactgtactctagcctgggtgacagagcaagatcttgcctaaaaaagaaaaaaaagtccaaaacagtctcaaagaggcctgcaaacccctggtagtttacattctcaaggttatctctgtcctacacatttcgatccagatttgagttttcacccttttattatttccataaagggacagtcaaaagaactaaccattacatttattcaaaacaggaatataacactctttcctgagtattttaggggaggagaaaagaggagttatactgcaaaactgcagctatcttttaagtgaacattaagcattccactttttaaattgttcttcagctaccttaaaactagcaggcattcattgactatttcccctacatcacactgaacttacactaacctgctttatccatacttcttcctcatctacccaaatgtaaaaccaaaaccttttctgtgccttctgcagaacagttttggttgccttggctcttagcacatccatctaaccctgttgttctcttccacccacgtaatttacccagtcatttcaccaggaaaaatcagtctctccctaagtagaatctgcggggtgatgggtcaagcatgctctcccacattacgtgtacatgctattggccagacactgtcttccagcatcctacttacttatgaaagtcaaagtctaaagtgaacaggtattttactcctgaggattgcctctagaaacgaattctctctgctggctcctcctccagtagcatgtaattcatggctcacagcctaccaggtctaggagggcttctaggcacttgttgagtgcagtctctttatttgcaggaggaaaaaatctgaagttcagtaaggagaattagattgcttaaaactcagttaggatttacaatgtaggactaggacccaagtctaaaattttctaccatagaagacagcaatatttatcaagttatatatctacaaaattgctaagtagcattattattatttgtacatatagtttattgctcattgactggtactttcattgtatcactgtactcattatttttatcaaaatttaattcttttaataatcatttttataacagtttctgaaatgggatattaaatgtagtatgagcagaagctgcaggaggaagggagctagaaagatgcctttcttcctggtgtggtaaagggcatggttccggaggggtgacgacaatgaaaaaagacaagaagtttcatgaaaaagtgttttattctgtgatctcttctgtttttttttttttaaagttttcctaatcttttgagacatatattttctataataaagccttatgcttatgtaactcttgatgtttttcaaagtgctaccatatatcatatcatttgatcctcaccaaagtttttgaaccatagtgaatacaccaagctgtaagtcaccttaaaagactccatgccaacaaccaacctgctttcttcactgacacccagactatgccctgcacattctttcaaacttcagcaatacacagacacaaagacacaagctggtgctctttttctctctccctctctcacccttttcttctttcataaatatttgtcaacagtcatgaaacaaagaaatttgcagactttatctgacatcagaatgtgcttttctgaaaatagatgcactgaatgagataatgactttggaattaccctatatgaatcattaaattattcagccaatgtgtacattctttttatgctcagaatctctttcctttaatcacctcaagatggggaaggagtataatacttagaagaggaatctggagatgccatgatgtggggtggtcaaaattatctctaggttttcttagaatattccaccatcctcagccaaactggaccaaaaagttatttcaatcagtgattccgttatatgggggagtctatttaatttttagaagcagtagtgtaatggatggacagtaatgacatgctttctggctggtttataacaaagaatgcatttgttttctcatcctcacatcttttactgcttgaatttccttccctatgtgttctagatgaagctttatttggtgctgctctgataatcacataatatcccttttccccccttcttttggcctgcttgtgtacctgttctctctgtatttgaaattaaaccaacccaatgctataattgagagaaagagcttctgttttaattagtctcagtaatagatatgacaataagcagggctcgttcacagccattgcatcaagcaatggaaccatcagatcgctgatcctaacaccatgaaagctgtcaccctgaagcgctctctgatggggtacttactgtctccaattacagttgtttctccattatccatagttgagggggtgaagtagaggagaagatggtgcctccatagaatttggtgtgtgcagaaggatacgggacgtggaatggggagttgggatttgcttactagctctccccctccaccggctaggtgattttggatgtctttctcaatattcttatctataaatcagatatgataatccacgtgctgcctaaactagcagtttttgtaaacactcaagtactgcaggatttgaagattgttaggcgtctctactttgccattcaaattgcttcctttgctgagtggaaatatgtattcaatttgggttccatctaattttcatacccatttcctgatagcattcagtggtcaaaaggaaatgtaaggaggaaagagagatgtaaagggaaagtctaatctgcagacttgatgatcagtgtttacagaattcgtatttgcttcaaaggacagccgtgactttaagaaaatccaagatggcccccctcagcaatttagagtcatttcagcacttggaagtctctggaattgcaaccaaactagtaatttcctccacccttttaaatatgtatataaataaaaagaggctttattggttaaaaaagaacatctgagcatttagtgaccaagaaaattttctgcagtgtagaagtatattttgcattaaattttaaataaagcattcatttattcattattaccttttaagggcaacaagtaagtgctacacgctgggcttggccctgagataacagagctattttgttaagctatggagtctagttagagagtcagctttggaaggcagggcgacagtgctgagcgctgggtcaatacggagtgccaggctgctcagaaggaaggaggggtgagttgtgggcttcttggctatggagacgaggagaataggaacattctaagcaagcccagtcagccagtgagaaagtggaaccagggcaaagtgtcagagagtgaggcctctttaattaatgacactttaagaaatattaactatttcaggaaatcagtcctgaaaagagattttgcctcctgaccatgaggaataaatacagatttattatatttacaaagctgccttttcaagtggttgacttagaggatcagggaatctctgtctctttgtagaaattaacttcaaataataactaactccttttatgtatttaccaggaacatttttgtcttttggttggtttgttttttattgattggtgcttaatggaaggcccagtgagacatttgtagctaaatttgttaggagccacttccaattaaagttcatttgtaatgaagataaatgataatctgagttaataggaagacagtattcaacattaccttaaaaatgatttacacagaacaatttaggagcctttctagtgcataaattaaggtgaatatatgattaaacctcaaactatcaaagcctctcatttaatttgatatgcaaggtgaaatatcattataaggaacaggatcctgattctatttgaaagtaactttttctaaaagcctacaaggcaaaaacgttgggccaactgggagggagcccagggcttatgctgaagttttctgtattttgctgtgctcttcttccagcccccaaaatgcacaattcctttgcctagtgggtaagcccccttctagagtgtaaacttaactgggagtggggtgggatcctgcctctgaccatactgcagcctcagtatctaaaataatacctggcactattaggcactagtaggtgtgcaactaatattagttgtataaatgaaaggatggatgagtgtgtgaatataataaaagagtaaaaaaacaaatggtagttcttcctgtatatatatatccttgttgatttacattgatgtgtacatatagacatatatactgatttacattgagatatatatacgtgtgtatatatatgtatatatgtgtatatatgtgtgtatatatatgtatatatgtgtatatatatgtatatatgtaaatttaccaatgtaaatcaacaagggtagctttaaaaagtactgatgcctatgtcccgcccccagataatcttatttaattgatctcggatttggcccaagggttgggatttataagtcttcccagggttctaatgtgcaggtctaggtggagtcaatgtggtatccttgtctcggaaggcctggggcctctatttctgttcaatttcattcatagacattgacctaccaatatttgtgatcttgataagaaatagcgcttctggtttaactttttattcctccctgtcacagtaagccacgaagtcatttcacctacattgtaaaatagtgctacctactaggagatcttccacaagtcacttaacttacttgaacctcagaatttagaaaatggatataatctcttccttgcctacactactatgtttttgggaagttcaattaagataatagatgcaaaaagttttaaaacattataaaatgtaatattataaaatttaagcaattgttagtgtttaggaaagcataaatatgttcatgattaatttgtaattttaaggagatggaatttgaaaatacctgagaatgttatggaatgttacagaattcggcttcataaattaagaaagatgtcctagctctgttagcttctattcataatggatataactacttaaactctttgaacttcaatttcaaagatacctcctgtctcaaaaagctgtgagaattggacacatttcagaagagtgctatgtgagctctaaagcattatattaaaaaagcctgttactttgtttttgttgttgttataatatttttatcccactcatcgtttgctggaaacggctccctttagatcaggaaggttgattttgtgcctttcaccactcgtaattcagtgacttgaaactggccatggcgggagtatttacacaaaggaagtcagtaaatattataaatcaggaccttggccgggcaccgtggctcatgcctataatcccagcactttgggaggccgaggcgggcagatcacgaggttgggaaatcaagaccatcctggctaacacagtgaaaccctgtctctactaaacagaaaatacaaaaaattagccgggcgtggtggcacgtgcctgtagtcccagctactcgggaggctgaggcaggagaatcgtttgaacccgggagacagaggttgcagtgagctaagatcgtgccactgcactccagcctgggcgacagggcgagactctgtgtaaaaaaaaaaaaaaaaaaaaattgggaccttttgttttttggagatccagtttacctatataccatagccaatatctaaaggtatctatcattctgaaagcgaaagagtaggtacaattgtccctcattatctgtgggtttcacatcatggattcaatcaaccacagattgaaaatgttcaaatgaaaaaataaggatggttgtatctgtgctgaacatggacagacttattatcttgtcattatttcctaaacaatacagtataaccactatttgcatagcatttaccttgtattaggtattataagtgacctagaaattatttaaagtatatgggagaatacgtgtaggttatatgaaaagactatgctattttacataagggactttttaccatctgtggattttggtatctgagtgggggtcctggaaccaataccccatggatactgagggactgactgtactcagtaatactgggtgatttgaataatttaagttgaggcatggttgaaaccaataacacagcaatggttgagatttagcttgcaatggttgaaatatagtttgcaattccaagtattagtttattaaggagaaattgtatctacttcacccagacaaaagcaaacaatgggccaaaaccttcatctttttctcctacgtactcaagaaaccaggaaagcatacagcatttgctagccctaaaatagaggatcacctgactagtcagtttactgaagctaaccagtcaatttgaatttttcaagccaaaatgtgatttattttctttttaaagaaaatctcttctgccctaaggaagcttttattttcttgtcaggccatttacttttatttgtgactgacggattgccatctttgtcaaccatcaccctgatgacagttggacatctcttgcccctcagaaacagctcccaaattcctaaagtagcatccttgtcatcaacacagtgggaatggcttatctgatgaagccccactgaatcgaagactgtttcatacttctgttctctctctcttgttctgatctaactaagtgatatatctaattggatttaaacacagggattttatggagtaactatagtctctgtacgagcagacatttagacccctgtagttccctacgtttttatcctctaaggcactccttatttcctgtaaatttagttgttgcaagtagatcattaggtcatgggtcacgcactgttacaaaaggaagttaaaaaaagatagaggcactgctctccatgctagaaattagccaggtgcaccattatgtaaagagcttcaactagagagcacagtaattaaaataacaatgaaacaatagcttatgcaacactttgcaaatatgatattttcatttgcggtattgtacaaaccaagcacatcaagcagcaatgttaagtaatttgcaaaagaccaaggggaagtgaatgaggacactggaatggagtctgtttcatgctatgccaatcaaaggcctattgtatacaagggggtgttgctgtctgtggaggtatctggatgacttgtatctcccaggatgttataggttagcaaaataaacagtgtatgatctagaaagggaaaggagaggtagaaaaatctgctcattggcatggagtgttgaagataaagttctcattttgcaagtcccaaaatgatgctttttttcagtgcacccagaaatgatcagatgtgaaggaccagatcatgattatcaagctcacaggagatttatttttaagtgactgacaatataatatttaagtagttgacaataaagtcatgtacaccattctagttattagactattcttctatactatgcagagaaccccttttcaggtattaagataaaaataatcaatttctaaataaagggtttcttgtgttctcgtcttttggtttctttgtatcagcttgctcatttctactctgaatttggcatatcccaccaattactgcatgcacaattaatctactggcaaaaaaaaattggagaagaaagaatttggaaagcatgaacacaaagttttccttagtctatgaactttgttttgacttgctatttgacctggtatgctgtggaccagccaaagtgagatgacctcctcagtgccacccaagcaagtctcactaaaatcctcttctctttggttgaaatttttggaatgaccaatcatcttttttttttttttttttttttttttgagacaagttctggctctgtcgcccaggctggagtgcggtggcgtgatcttggctcactgcatgatcgtggctcactgcaacctccacctccaggactcaagtgatcctcccacctcagcctcctgagcagctgggactacaggcacatgccaccatgcctggctaatttttgtattttttgtagagacaaggtttcatcatgtcacccaggatggtcttaaactcttgagctcaagcaatcctcccgcctcagcctcccaaagtgctgggattacaggtgtgagccaccacgcccggactaatcctttatttttatctgtgaatgtatattcatgatacaggagcttatatggtgggactggaatcatttgttcaattatccctgactgcattacctgctgatgattggtaggattgtaagtggtgtgcagaagaatgcagtcttgggactcatcaaagaccaccttaacaaagaccacctcaaagaccctcctcaaagaccaccacattccacactctaggagctgcaaatggaaatgacagtttatggttacatggcctaatagtattattttatttttttaactgacaaaagttgtatgtatttatgatatacatcatgatattttgatagatgtgtacattatggaatgactacagctaatgaacatatgcattgcctcacacacttatcatttttttttgtggtgagaacatttaaaatctacactcagcaattttcaagtatacaatacataggccaccgtgttatataatacatctcctgaacttactcctcctaatgaaaattttgtattctttgaatggtcacatggcctaaataactgaattatatgtgccatatatccacaaaaattatttactttacattaatgaattacttattagaatttgaggccattatactacagtttacaatagtgaacaaaatattccccacctttattcccagtagaagacaaacagtctgcaattctttcctttagatctgcctccaatatcctagatcttgtgacattaaagctaatcaaatggcttgataaaatgggaattttcaaagcataagtgtaaagaaacctgcagctatagtgctgacagcaccggtcattgaaaattaatcttgtgggtttatatgacagcactgatactgataggtatctattcttttgcttagtcatcgtttatttattgagcacctactaatggctgacatggaggtgggccctggaggtaaaaggctgagtaaaacagatatgattctttcctcagggattttattgtcaggtgagggaagtagccattattcaaataaccccacatatacatttctaattctagcaagtattgtgaaggaaattaaagggtgattatttaaacacaaacaagggtgggaaagcgtttgatctgagagctgaagggcaaatgagaatgaactattcaggggccaggtgtggtggttcacccttataatcctggtactttgggaggctgaggcaggaggattgctgggggcaggagtttagaccagcttgggcaacatagtgagaccttatctttacaaaaataaagttaaaaaataagaaggatgaactaacggaagagacatgggggaaggagtggaaggaaaaaatcctaggtaaggaaacaacatgacaatgttgtctttctcatgacaggctttctcagaaacaaaagaacagtgcaactggaatacagtctgtgaggaggaaggcctttcatgtggaggcaagagagattagtcaaagtccagagatcactcgtatggcaggccttttgaaagattttgctctttttcctaatgacaaagccttgaaggatttagagggccatcattcagatctggggtccgttgggagctttaccaagcctaagatctccctccaatggaaagacaactatgttgtcttgctaatgacccagcaaccatcagattccatctgctggtagctgtcaaaggcaatgacagcttgtccatgctccaaataactatattatagaaaatatggtaagcgtgggcatctttgggcagatgtcatccaaaactttcactggattctcaaaagtggtccatgactcagaaaaaattaccctaaactggtactttcccaaatgtaatctagtttagcatttttatctctaacttgtttttcttcttgtttttatgttaaaaagtcactgtttctaatattctgagtgagcattagtgcgagctaatggctttttaaagaaaattggtggtggttgttactaaagttgatggatttattgagcacctaaaatgttctttttctgttctacaaagtgtgtgtatatgtgactattatttctgcaattagttcctgattgaagtttctactgaccaaggggccagtgattatttccttggactgtggattcaggctctgttttttttcagggattcctacagcaggcaatccctttctgttctatgagctacgaaagacagaatgattaaagtggttctatttccaaagtacgtaggactttgtggggaatttgtttttgcatgtaaaatacttcctaataacatataatcagctacacagtaactctttatggtatggcaacatttttgtgcaaattactatactaggaaatccagggcccacaatccacttccttagaaatgtgtattgatctcctactatgtgtgctacattggggatacaaaattataaattatagttgctgcccccagaggttttaaagtctattaaggtttggccggacgtggtggctcatgcctgtaatcccagcactttgggaggccgaggcgggcggatcacgaggtcaggagatcgagaccatcctggctaacacggtgaaaccccgtctctactaaaaatacaaaaaattagccgggcgtggtggtgggcgcctgtagtcccagctactcaggaggccgaggcgggagaacggcgtaaacccgggaggcggagcttgcagtgagccaagatggcgccactgcacttcagcctgggcgacagagcgagactccgtctcagaaaaaaaaaaaaaaaaaaaagtctattaaggtttgatgaaatatattttacaaataatgaaaatcagatgtgttgattgctttcatagacatatataatttatctcatttaatatgtagtgattgtgatagagaatagaacaatatgtaagagggaatgctgcctctatgagttttacacacataaataagacttttcaataaaatgtgacgagtgcttggatacaggactgcatgtagaaggcagcctcactgagagtagaggattagaacaggcttattgggaaagattacactgcattgagtcttgaggaggacaagctagctaggtagagaaggagtaagggggtgtcaggcagagggcacagcatgagcaaaggcatgaaggtgagatgggatagttcccttgacccatctgcaggattcctgaaggctcatttgcttagcctgcagctctgaacccctcatgggaggggaagcacgcaggtgagcgggtgcaggtgccggggcagatgaacactggaactggctggtcactccgctctggtgggagcaggctctgtgtgggccccgcagcagtgtccaactgtgttgcaatgctcttttagctctgccatctgggaaagagtgtctgcgacccctggagccccagagggtgtatgttacaatcagtgctcctttagcattcgatgtccatggacagctaagtgttgaccagttcagtggaagatcagagtgacagccttttattttacactctgtcacttggtacctgagttcttgtctggtgtccaggaagaattaggtcatgcaaatgaattgaaagatggtgtatgaggaagattttgttgagcagtggaagtgggtctcagagggaaggggagctggaaggggcaaggcagtgggaagataatcttcccctcgagttcgaccatccccggccaagctcttctctgaagtcctgccatcaagccgttcctctgaagtcaagctgcttctctccgacatccagctggttattttcttctcttctcctctgccactccactttgcccttctgccagtggagcttggggtttttatgggtacagggtgggtagcgggatgggccagggtggttttggaaatggcaacatttgggtgggaaaacagaaatgtgaagttctcagttagggccatgggtccaggcttgagggtggaaccctcgccagggacccaccctcttctacccagcattcccctgcctcctgtcggtatcagagggatgagagcacctgctagatgtaaggaagcataggaaggaacatagaggaaggaacagctatctcctcttccactaacgcaagtttaataaaggtggcttttagagctgtcatcattaatgagatgcgagaagacatctcaggaaaagggagcagctcatgcaaagtcatgaactagaggaaaacaaggtgtatttagggaaataagttgtttcctactgtatggtgtgtgctcagggaacatgacaggaactgttgggagtctatggaggtgggtcaggagggcctgagtccaaaatgaccattctcaaacacttaaaattaagtctgttggcaaagatttcaatatgggcttaaggtaatggaatataaggaagtagtgacagcttgtgctctcagttgttgcaacatgtatggagaggtatagctaccaggaatcacaaagcagcacgtacttgtcctccattcagtagctattgcaccatctcctcctatatgctgtgctatgagctgtgagtttctgctcaaggtgctcgagaaacagcaacaaggaaaacaaaaacctagttttcctggagcttacatgcaagtaggggcaaaaagacacaagcaacataagtaagcatgtgtgcagtgtgttatgtgataagtattacataacagggatgtgtgtcacagcggggaagggggaagagggtgagctgggatatgtttgtaattcagatgaggttcttggggaagatctcactaaggagatgacattgaggaaagacctgaaggaggtgaggcagcaagccatgaggaagaacattctaggcagaaggaagaaagcaagtgcaaagacttcacctcgagggaggagcgtttgaatgattttgcagaaaaacagagaggccggtatgactggacagtctgagtaaagagaagaatgagatgggatggattcagttgcaagtgattgaaatgaataacaagcattcatcgatccaaggattcaatgaccctaagtattcttaggtagaaagcagggtgacaggcagggtgaaataaaatcttcctctattctgtagagctgtgacttaacctttcagtcttgtgaaaatatgtatttattggtactgctggacagttttcctgctggctgtggagagagtcttggtgaacagagaggcctgcagcaaaagagttaagagatactttctactctagatgaatcagacagaaatgagtcattttttaaattacagaggtggacaccactttacttagcaactgtccttttgaaaattagctttaattttttttatttcagtcataatcacggaactataattactggaaaggaccttgtttgtcatctaacccagctctcattttatagtttcttaagaaactaaggtatgaagtgtagctgaaatactattacaaataaatctattcactatttaaaacagtattctcataaggaatcttttgaaaaatatatataatcccttaaatttatagtttcaaaaatgttttaaaatatttatgaagtccctactatgtatttgacactattctggcatctgggaattcagccacaattaataaggtagatttcatccctactcagtcagcatttacattgtgctgtgaggtgggagtagggctagggagagctgggagtagtatgtatagatgacaaaccagtatgttaatatatggacaaaataatttcagagaaagataagtgatataaagacaatcaaagcacagtgatgaatcagaagaattagaaagtaccagagctgtggccatgcagtgccgctctgagaaggtgaactttgagcagagaacagatccaccttcaggagttagtggtatgggaatggcatggggaggggaccaggttttccagtcagagggtacagccagcacaaaggcccgagcttgctgtgttcaaagaacagacaaaaaaaccgcatggttgaaatgtaatggaggtgtgatatgtaagatgggtgtggagaggtgcaaggtggccagcccacatggggcctcttaaagactgtggttagacaggtctacgaaaatgtcagaaagctttcaacagggaaatgttgacatcaggcttcatttttcagaagatctggcttctgtgtggagaatggactatgttgggacaaaagacgaagtgaggagattagatagatgccaattttaccagctccggcaagagaggttgaggcttatgcttggttagcactggaagtgaagaagtaggagcagactggattcttttctatcagatttggagtaccattagccgtataaatcattgtggggcggggaatgcctggtgccgtggctcgtgcctgtaatcccagcactttgggaggccaaggttgggagcattgcatgaggccaggagttccaaactagtctgggcaacacagcaagaccctgtttctacaaaaaaataaaattaaaaattaggtagacgtggtcacatgcaccagtagtcccagctactgggaaggctaaggctggaggatcttttgagcccaggattttgaagctgcactgagccgtgatctcaccacggcactccagcctgtgcaacacagtgagaccctgtctcaaaaaaaaaaaaaaaaaaaaaaaaaaaaagtaaaagaaataaaagaaatacagatttatttagtaacttcatgtaagagaatatgaggctcagaagatgaagtgtggctttttcgaaacacaagataaaactatttactgaaaagcctagacttccaaattggttgctgaaaggatcctgggatggaatggctcccactgatgagagcttaagcatggctttctgctttccctccagctctgggaagttagtctttttttcctccctcttccatatgacttgttgccaagttgtttgattatctccatgggttgctttcgcagcaaaactagatgccaggtggaacgcagtctcctccagctccctgattccttgtggccctcaaatataaaccatgaggatttttatttttgagatcatcactgggaaaaatcacaacacaaacttcaaacatggagagcttttagagcactgaattttttctaagttttcatactctggattctttatgagtatgtcttattttctttggattctttgtcagatgcagttctggctaggagaggccgaataatggcccctcaaatatgcccacatcttaacaggtgacacctgtaatatattaaatggcaagggtgaattaaggttgcaaatggaattatggtcactaatcagctgaccttaaaataagaagactatgctgcattattggtgtgtgcccaatgtaatcacaattgttctttaaatgtggaagagggaagcagaaaaacagagttagagagaggtgtgaagagctggcttcaaagacagaggaagtgggccaagggccagggaatgcagatggcctctagaagtgcaaaagataaggaaatagatttctttgtaaagtttccaaaagagaagtagctctatcaacacctggattttagcttacctagacctgttttggaattctgacctctggaactataaaataataaatttgttttgttgtaagctaccaaattttaggtaatttgtcatagccacaataggagatgaatacatttgcattctgccattattctctgagaagggacctttgaactgagtccaaacaattgttgttaatggaaagggcttatctagccttcccaatttatcttttttgaggtctattataatggatactatgactactactgctactacgattactactactgcatttgagcatttactatgtgtttgcactgttttagacacttaactgcccttgtcatccttattttacaaaataggaaactaggactctggcccaaggagtgtgacaccagcttttcaatgaagaccttacttcttcctctgtgagagtttcacttgctagcaccttgcaggtgaaagggagggtggaaaggacaacttgaactgtatgttttcaagagttcactcacctcaattataaatttacatctctggagacctcacactgactcccatctcagaggtctcctagcttcacgacagaaagagaaccttaggtcatttcctgagagttaaggaaagttaattaacatttaggaccaagggaccagtttaggtgcacatttcttgatgaagggcttactgagttgtaaaagttaataggaggtagaaagataggaagagagaacttaggacagcctgggattttttttttttttttttttttaacaattcacaaactaagatttgttaagattctactaagaatctactttggctacatctgcattatgtggtagaggaggtgagatgccaagtttataagtgcatcatcatctatctctgctgtgtttatagaatagtaacacatgtaccgaacataaaaacacactaaagcacacaacaagtgtttaaatacagagtattgcccatttagcaaaaatatccagacacaaagttgagcaggcatcgagctggataatgcttccatgatgcaagcacccacattagtgtgggccttggacaatgggaggggcataaaaaaggaagcaatttggctaagaccccaaggggtgcttggagaaatcacccagtttgggggaaataaaattggaaaacacaagctgaaaacagcaagctcatgcaaacaatagagaaaggcatctaagtggaaaacagagactgaaggaaaattagaattaatttaaatgtaatttgtttaagatcttcagttaatcatctgcatgctgtttttcatccaaacacagacacatttttgagatgagaattattgttaaaaaaaaaaaaaaagatgttaaaagaaaaaaactgctaagtgtctcttagactgtcccagcactagctcctcttcctccaattcttaatgatgaaactgaaagtttgtggttagcataatgtctgtatgcagtctttcatcagcaaaggagaactcaaatttcttgattatcctgacttgattttccttgacactgagtagcagtgtcaagcacctcgacaagattttcagtaacaacaagagcttccaggtaaccagtgctttctcaccttgggaattcagggcattagggttttgtttcgttgtcctgagtcttcagagctaaggagacaaagcaggatgtagagactttttaccaagtgtagttatatttggtccccataattaaacaataaacaaaatcaacaaagaaatcaaaaaaatgaagatggcgatctttgattttataaaaataacttccagtatcataaatttaaggtagaaaactgagtaatggactgggaagaatcatttataggatatgtaacagacaagtgattaatctccagtgcacataaagagcttctataaatcaataaaaatctgaaaaatggacacacaaatgtaaaaggaaatccagagaagaaatataaatggtcaatagacataaaaaagtggtcaacttcaataataatggaggaaatacaagctaaaaatgaaaataacaaaaattaaacaaatttattctatccagtgatggaaatgatgtagaaaaacagctaatttcatgataggatcattaattattacagctttcctggaaggcaatagataatatgcatagatattttttaatgtgcatatcttttgacccaataatcccatttccaggcataaatcccagagatatacagaggtgcacaatgatgtatatataactatatttattggatctcatttctgccaaaaaaaagtatatatgatgtacatgtgtatatatcagtgtagaaaagtagaacctcaaaaagtatataacacgttaacattgttgaccctagagaggagagtgtgtattagtccattttcatgctgctaataaagacatacctgaaacttggtcatttatacaggaaaaaaggtttaatggacttaacagttccacgtggctggggaggcctcccaaacatggtggaaggcaaggagcagcaagtcacgtcttacattgatggcagcaggcaaaaagagagagcttgtgcagggaaactcacccttgtaaaagaatcaaatcttgtgagacttatttactatcgtgagaacagcaggaaaaatctgtacccatgattcagttacctcccagtggctccctctcacaacatgtggaaattcaagatgagattttgttggggacacggccaaactatatcagggtgaatatgacagataaggaaagaagggaaattttcaccttttattttataaatttctatgttgtttaactattttacagtgaaaacatatacatgaattcctatataattcaacatgcatagccatggacatacattttaaaatctgtttaggaaaattgtttaaataattctaattgattttggttacatctgtctacagatagtgactaagcattctagaatagaagggattagataaatatgcagacaacaacgattccacatgtaattgtgataatggaatgtaaaaaaagacgaaatttgttttaaatgtcgaaaataattcttgagaaatctgttttgaaggtgactgtgtacaacagcatttttcttcttctcctcttagaaattatacaaacacaagaaggagaaagaaattaatgttaaacccttttccttgatactccatgaagtttatagctttcataagaatgtataaggagaccaaggctaagatggagcagaagctgcctgggaggaagagcggaggacatgaggagcgttttgaaaggatccagtggcagcaggtgtcagagagcatcagcaaaaatacacgttcttcagggaagtctttccctgatgtgccaacctgttggccataataaaaggttttacttgtggataatactgacaatatcctgcatgaaatatgactaaacagaaagcagctggcagttaagggaataatactgttgatgaggtgggatttattggagcaatacaaaggaattattgataaaattcatcatactaataatgtacaaaggtaaaatttctatgatcaatcatcatcacagacactgaagtgaaaatttggcaaaattaaataattattcttgattaaacacacacacacactcaaaataagtatgcatggatacactactaatatgacaaaatatttcaagcttggccccaaagttaatacttaaacaattagtgcaaagatcactgagtgaagtagcagtatatgattaatatgcaaaaatcaattgcttctataaaatagctggttagaagatttaatgatagaaaaacatcaatttaaaatagcagtccacagaaattgaaatacttaaaactttttgttttatgtatggcctgtatgaagaaacattccaccattcctgtaaaccaaaaaggaagtctatcatggaaagacataccaccatgtgcttggacaagataacgaccgggcgcagtggctcatgcctgtaatcctatcactttgggaggctgagacaggcggatcacgaggtcaagaggtcgagaccatcctggccagcatggtgaaaccccatctctaccaaaaatacaaaaattaactgggcatggtggtgggcgcctgtagtcccagatactcaggaggctgtggcaggagaattgcttgaacctgggaggcagaggttgcagtgagctgagatcgcaccattgcactccagcctggtgacagagcggactccatctcaaaaaaaaaaaaaaaaaacaaacacacaaaaaccccccaaaaaaacaacaacacaaaaacacattagcaaaaacatgacagattcataagtcaatttctatatgtaaaatggtgtcagttaaaataccaccatactgggcatggtggttcatacctgtaatcccagcactttgggagaccatgatggggtttgaggaaggtgtctctcaagcctaggaattcaagaccagcttgggcaacatggtggactctgtctccacaaaaaaaattagaaattagccaggcttggtggcatgcacctgtaggcccagctactcaggaggctgtgaggtgggaggatcaatgaagcccaggaggttgaggctgcagtgagtgacccgtgatcaggccactgcacaccagcctggatgacagagtgagactctgaaaaacaaaaacaaaaacaaaaaacactcaccaaattcgtagaatcagacacattagttctgaagtttatatgcaaaaatcagcaaattagacaatgaatgaacaaataccgtataagaagattaatgaagtatctatggttagaaattgagaatacactgcaagcttctatgaatacatgaagagatctctggaaaataatggacattctggacagttgatctaaatgcatatggaaattcagtgtatgaaaatgtatcatcttaaagcagtgaggaaaatatagatcattcagtaaaaattgtagcagtctgcaacaaaaacataaaattactgttggattgttatcttgagccacacaccagcatagattacaaacaaatcaaagcttataatgtaaaaaaaaaaaaaaaaaaaagcactgaaagaaaacatggacaaattcctttatgaacttgaagtagagaggcggcttttaaatatgactgaaaatccattaatcattaaaggaaaggataaatccaaccatatgaaaataaaaaccttctctacgggggaacatgtcaaaagaccactgattgactgggagaagcttctgcaattcatataacaggcctaattttccgtaaaacatccctataaaaagagattttggaaatcatgaagaaaaaagattttctactcaatagaactgaaaaagaatataaacaaataatcactgacagggaagtacaaacagttcttaaccatatgaaaaatgctgaatttcatttttttttctttttttttttttttttgatacggagtctcgctctgtcacccaagctggactgcagtggcatgatctcgactcactgcaacttccacctcccaggttcaagcgattctcctgcctcagcctcccaagtagctgggactacaggcaaccaccaccactcctggctaatttttgtatttttattggagttagggtttcaccattttggccaggctgatctcaaactcctgacctcaggtgatccgcccgcttctgcctcccacagtgctgggattacaggtgtgagccaccacgcccaccctcaacttcattcttaataaaataaatgcaaatttaaaatacattgagatactgttagtttggtttttctttttcacttgtcaaattggctgaaatccacaatttgataaaacattctgttggtgagagcgtgaggaaatggacattctcatagaatgcagtgggggaggaagggagcataaatctgcacaactcctgtagaagaagtctgtttagaaacaactacaaaaattacaaaatttcaaattcatataccgctctgagaatacagagaaatgctgtccttggaacttatccttcatattatgtgaaataatacgtaaaatttcattatggcattcttttaaaaatagcaaaaggttagggaaaaatccagtgtccatcattaggggactggttaaatgaagtatggtccatccatacaaatgaacattatgtaattgagaaaaagaatgtggcccctccctatgtgttattttgggtaaatctcccagggatacggttcagaaacaattcaacataaagaggagtgtgtgtagcaggttgacttttgtgttacaaagggaaaatagtaacatatgttcatacttgcaggtttctaatcctgtctccaccgcttacatctgggtaaatttgggcaagttacatgttgtgtctgggcttcaatggtatcacctagaaacgaagataatcactaccacctaaaaaaaattgggaagattaaatgagaaaaatatttacaaagcacttagcaaggtatttggttcacaattgttgtaaaaaggacagttactactctaaggggctctgccttctctatataaacttataaactttagaaactaatctgacagcctagcacctactaatatttatttgctatagttcacccagtgtatttgtacatttaaaaatatatatctcatgaagtcccagagtgcctgaggattgaaaggggacagcatcacagctctaatgctaagagatacagaccattaaggctccatctgaaatcaagtatctttaaaaaataaaaaaaagaaggaagtaaaattcaatttgtatgaaatttgatttgcacaagttctcagagaaacaggaactggataaagtgaatttcacctgtatcgaatcatcagtcaccttcagtacctaggaagacaccaaaacaacatctggcaatcaattttccatctttcagtgcagcctgaggaactgggtagcaaccagcatggtattgtaaagagaaaactgtgtgggccaattcaatttcctcctatgacagaatgacaggtcacagagataggagaaaagcaatagatgtaatctacatgagccacagcaagtcttttgattcagtcccacatgacggtctcatcagggctttctgaggattgggtctaaatcagggtttgaggaactggggcccctcctacccccaccagcgtcacccaaccctagcagagtgctggatagaagcagtgcgataatctactagagactggagcatgtcagggacgacagagaagatagaagggatagagggaggtgaaattaatgcagacccagagacagagtaagaaagagagagtcagagacagagagaatgtgtggaaagtttctaggattaggagactgtaagtataggttaagacactcagacaggtgcagttgctcacacctgttatcccagcaatttgggaggccaaggtgggaagattgcttgaggccaggagttccagaccatccctgcaacatagcaataccccatctctacagaagaagtaaataagtaaataaaaattagcctggtgtggtgggatgtgcctgtagtcccagctacttgggaagctgaggtgggaagattgcttgagcccagaaattctaggttgcagtgagctatgatagcaccactgtactttagcctgggcaacagagtgagaccctgtcttagtgaaaaaaataggaacaaaagtaaataaaaatagaaacactcaaggagataaacatgagctgggagactatgttgacagcagggagcttctcatgggaagggaagatcctggtgggtggggaagccaagcacctccatgtcactgaggatgtaaagaaaaatggacaaaagagaataccattcacagtcactcactcattcattgtgtgtgtgtgtttgtgtgtgtgtgtgtgtgtgtgtgtgagagagagagagagagagagagagagagaagaggaaggaggtgaaatctcaattaggagttttgtgagaaactattgggttatgaaggtgggaagagcggagctcacactgggaactctgcttcaggatcatatagatattggaaagtttcgttgtagatattggtgaaacttgtccattgaattactgtagaactggaaaaggaggaatgaatgttactgttgagtcaaagatacgaatatgaggacctaagctggatggaccagtttctcttttgctagctgtcctagctcagattctggacttgttgtaagaagatgaaggggtgagggaatatgggtcacaaatagctttgacttcagtccaaagagccctctaatgtaaagaagacttggtattttctcatcccagggaaatcatggccttatttttaacacaataaggtaaattttctcattagaaagttcttaatttgtcatgtcagtaaccatgtccttctaattgtggtgctgtcagttcactactgcaaaaaaaatgatcctctgttctcaactcggtctcagttactgcatcatcgtaatagtttgataattttattactactcgaaggcaagtgatccttcttttgttgactactgaggaggaaattgttaatgacattaatagcttgataatgtgacacagaactctgggtaatgcctagtctgtgactgtgtggtttgtctggagaattgagtaagaatgctgggaagaaacaagagcatcatgactttatgggatgacttgatgcccacctccaaggttgctgtgacgattaaatgagatagtgtatatacaaaaatgggcaatagcaatggttcaataaatgttagctttttatgaaaatctaagttaaacttggcttattctcttctttattgtcattcattctgtaactaaaaaaaattagttttcttatcaaacactgggcaggaaggatgaacttgaccacttcattcttgatacccatgaagtcagaatcgggtaatgaaaatcattcattatatctgatgccataaaataggcttagaatgatgtgtgaaatatagtaaatgttcattaaatatatgttgtcattattattagaaagggtggagagacctaattgggggtgatgacatgaataaacttgtcctatgacattgacttttaatttatacaagttggttttgaaaattgaaaaaaaaaactgactcctgattctctcatggacttaaaaatttcattttgcactccagtacgatctggcatggaggagatggactctgcctagtactgtcagcagcttttggagaaggtcgggatcctgctaagatgagcacagcatgtaatgtttgtcctttggaagcaaacactttgccttcattgcagtcttcttgtcagaaggaagatagaaatgggagatggggagaagtttttataattaaagaaaaaaaaacttgtttcattcttagcctggggcttcctggggctctgaggattccagtattattggagtatctggagaatcacagttctctctagctgatcaaaagtaaaattaaatgtgaggccgggcgcggtgactcacgcctgtaatcccagcactttgggaggcagagtcgggcagatcacctgaggtcaggggtttgagactagcctgggcaacatggtgaaacctggtctctactgaaaatacaaaaattagccaggcacggtggcgggcacctgtaatcccagcactttggggaggggatcacttgaggtcaggagttcgagaccagcctgaccaacatggtgaaaccccgtctctactaaaagtacaaaagttagccaggcttggtggagggtgcctttaatcccagctactggggaggctgaggcacaagaattgcttgaacccaggaagtggtggaggttgcagtgagctgagattgtgccactgcactccagcctgggtgacacagtgagactctgtctcaaaaaataaaataataaaataaaataagataaaatgtgaattctgtatcactttatcaacacatggaccccaaagtctctgtactgtaaagagatggcctcagggctgggaggaaagactcaggtagctgagacaggaaggcagtcaggttctagggctggagaagcatcagcaataatggataatgcagggagtggaggtgggaaaaggagtacaagatgctttcttgggcattttttgaggatagaattcaagggcatgttttatatgtgtgtttcttttaaaattcttgatgcaaattaccaaccagaaagcccagggtagatggagggtagggaggatggaaggtaatccattgctcagtaagtgagataggtagagtgcccctgcccccaccaccactgtgccactatttttctggaagcataagagatacccagagccctgggtgactggagcagccacaaggctggacacaggctaggctagaatgattttactttggctaaaaccagaatgtccggggaaatgtggagcccacgggcagttactaccattttctttttatcagtccgtcttctcatgtggtttcttgggaatatgttctcactcagaagaaaagtgaaattccagtaatgccctctcctgacttctacactgagcaagacatgggggtaaaggctttgcctaaaagagcagggacccaggagggatggctgacctaccgcccatcttccgtctgactccagtgggggtggttctaagatattggtcctaaacgctgagactgctgctttgacatttactggagtctcccaacccatctcttaatcttccctttgatttttatttctgtgttcattggcttctgttgcttctctgccaggaagatacagtttcctatgcattatgatttgaactcaaaaaacagaaggctatcagaaagacagaagtttctttttatctgaattcagaaaaacatgttggcttggtcttagctagatgtggtcagaaaaaaaggtgaataattgtttggtaatttcatgggatttatcgcaaacttaaaataaaaagtgagattctctttaacttctggttaaatgctgaatcttaaagtactatatgttgaaaactagatatgaacaatcaaattaaaaaataaaacgtaaaaattatctagatatggaaagcttgttgatctttctacatgtcaaagcttttcaatttatttgaaaattggaccaaactctggcagtttgtaccattttgttggatctttttgccaaattctaggcttctaacacatcagtagattccagactgtcacacattatatcattttatactttatttatctgctgagtttaattttgtattatttataagcaatatcacctctccagaataatgactcttaaatattattcaaagaaggtttgtattttcctgaagtattttttctgttttttaatctccctctgaaaaatactgtgggcagacttgattgatatttgacaaatgagtcaactaaggcacagagaggttcagtgactttctgagggtcacacagcatgtttatggcagagacagagctctcagatctaattggtttttcttggtcatgctgtcatttggcgatgcagtttttaaaggggctgttcctgtacactgcattttcaccttcaccattattcaaatcaactcagttatttacattgttgggcccgggttggtacttcatctgttaaaataaaaaacaaaaataaaaatataaactgatggcataatactgcatcccaaagccagcagtaccattccccacaggccagcagagggtcaggaataattcactcccaggcctctgtgaatggctctgtgcttttccctaggctacgaagattttactgtctcaatgattttgtgttggacgattcaattaaaggtcttaaaatttaacgtgtatacttttgacctaacagtttgatgtttaggaatttaccttaaggaaataatgcaaataatgagtaaaagatatatgtgtcaaaaaatacattaacaagtatgttgatgataataaataattagaaattactaatggcacaaggaattggtagagtgaattacagtcaatccacacaatggaatatggtataattctttgaaattgtaatgtagattttggtttatccacagctaaagatctccacaatattttataaaatgaaaaaatatatatgtcattaacaatataatatatttatggtataccaatatatatttatgatacgtactgtggctgagaaaatcatgagtgatttaaattttcttccaaataaagttttgaacattttatttttgtaatgtactttcatttttttataatcatagaggaaggtaggaaaggaggcagagtaatttttatttttttttttttacttatcggctacatggaatatttccaagttaaaagtttttataatggaagtggtatgacaaagaatatttgctattcttaacgtgtttaagaaataggctatttaatggatgctgtatacacaagaatctatttgctttgtgctgttcgttagactgggatggggggtacagaggttgaatagaaagcacccaatataactgctgcattatgataatgcagctgcttgtatataaagacactacctagcaaaattttgaaatgacttttccccctgacatgactaatgctattgctgttaattaagtgacttgtttggaggaaaagaataattgtgaaatatttttcagtacattcctgtcttcgaagaggaatgagttcccatagtcatagtatgtatttatagaatggataatacataaaacaaattagagggtaaaacgctatactcaaagcacgattttcatctgtaataagacagtgtcaaccccctggaagatatttataactgaagcattgcttctagacatgcggatttaagagattagcatcaaggtggtccctgggacagatcacaggtagcacataggcttagagaaagccatttataggttctctcatgggttcaaaataacagcagttgataatctagtagctagtgttttttctgtgtttttttgttggttttgttttgttttttgaaacagagccttgctctattgcccaggctggagtgaaatggcatgatctcggctcactgcaaccttcacctcccaggttcaagcagttctcctgcctcagcttcccaagtagctaggattataggcttgcgccaccatgcctggctaatttttgtatttttagtggagacagcgtttcaccatgttgaccaggctggtcttgaactcttgacctcaagggatccacctgccttggcctcccaaagtgctgggattacaggcgtgagccactgcgtttgacctagttgttttttgttttgttttgttctgtttttgtttgtttatttgttttttaaccattcttaatgatctggtgcggaatggagaatggcgtcaaggcttaaactagctaaatgaatgctgttgagaatcgggtttaataatatttatatacttatttttattgacaaaggaaattaacttatcctaaagaaacatcgaaggtgagagagaattgcactgagccaagccttcctggcatcttttatctggcacctcttttacctagagcatggatggcaaatcttcatctaaagggttaactctaatcaatcaaacaatgtgtcgagaaggatcttgaggcactgtcctgtctctgtgggaaaatggaccatggccgattcatgatacctgtcatagttaggtgtgagaagagcaacaatactcatgtggtacattcaccaactcagagcaaaggaaactcatttggaggggttagagggatttgtgatatgctattatgacttttcgattgttacagacttaagctgttggctttgttgacctaatttctctgactcaaaaccttgtttataaaatcatagggaatgtgaaatgccttacagccttgggtaaattagggtcagtttgagactggggttgagactttggagcctgtagtttcttctgtggaagcccaagagactcactctgcattcatgttttctttctttccttcccttcctttcctttccttcctttccttcctttctttccctttctttctttctttctttccttctttctttctttctttctttctttctttctttctttctttctttctttctttctctctctctctctctctttctttctccttccttccttccttccttccttccttccttccttccttccttccttccttccttccttcctttctttctttctttctctctctctttttttttttttcagagtcttgctctgtcacccaggctggagtgcagtcacgcgatcttggctcactgcaacctccacctcctgggttcaagcgattctcatgcctcagcctcctgagtagctgggactacaggcacatgccaccgcgcccagctgatttttgtatttttagtagagacagcatttcaccatgttggccagacttttctcgaactcctgacctcaagtgatccacctgtctcggcctcccaaagtgctgggattacaggcgtgagccactgcgccctgcccctgcattcatgttttcataaggtgtccctcagatgggctctgaatatagatcaaacctacagtccttgcgggttgaatgcagagctctcacaggcaatggagttgatttctcatatttcttcacaatacccttagaaggttcagatggactccccatcttattgatagagaaatggaagcctagagaattgaatatgatgtcatacagtctgttaatcatacaactcagatataagcccatgcctttttcccacctcatgtgctaacactggtggaagagaaggtcaaacaagtcttcgcaatgtatccagagaagtgaggctttattttattatgcgtctgtcaaagtcaaagcacttttattaagtgctgggaagaattttatatactaattagaatggtgtatgtgagtgtgtgtgtgtttgtgcatgtatgcacactcatgttgtgcatgtatacacacccatgtttgaatgaaaaggggtgagaggaaacatgtagcaaattgttagagctattcccttggtggtaaaaatacttcaaatgttcatgcattagatatatcctcataggccttttcacaaagtaacaggatttctgactcaatttaaaatctgtccagaggatatttattattggtaatttataaaatggatagtagaagacaggctgatatattagtatacaatttacaacattttagggaaaactatggtattttctatagtatagaaagataacatagccgcacacctttcaaacactaggtgctcaaaaaagtgttttgtttttgttacttgaactataggtttttgctgtatgatgcaaagggtatcactttgcaaaaatatttgcatttatgaggatgcaaatgccacatttgtaaaaaaaaattaaatgctaaatgcatccaggatactgactcatatattaccatggttttataaagcaaacagtcatctaaaatacatgccattatgaaaaaaatacagatgttaaaaacctctatattgtctcctgagtaccaaatgcagctggtatgggcttgagaaccacaattagcaagctctgggtctttctctccctctcctggggtgcattccccaacttccctacagattgatgtacccccactctggactctccttcagcttggcacatccttcattatggaacttacagcactggataagaacattctcttactgccccataagactcagctctttgcatgcactatgtcttggtcatatttttttttctttggctccagaaagacaaacatataaaaaatttattctacatatgtcatcagtatttgtcacatgtatgaatgagatcagtgatctttactctatttcagggccccaggaggctatgtcataaactgatctaacctccaatggagggtttctgactgggagatatggggtatggatgctaactgcagtacactcaagttattggaaatgttgagctgggcacccaagatggcttactcggttgcatgagggtttatttggcggctgaacgctcaaccaggatgttgaataatgggcctatggcctctccagagtaatggtctcagggcagctggacttcagaaatggtggatggctttccctagaatgtcccaagggggccaggcaaagtttcatggccttttatgacctagccttggaagtcatactgtgccccttctgtatctatctgtgatctgtccattaaagcagtcctaattgtacccaagaggaggagacagacacctcatctatcactaggaggactctttttaaaaagtgagccatgttttaaaactaccattgtctcatcttctcaaaatcagttatttctactatctttttaaattttagttgtaatagtttatcactattttgttggtttcccattttttaagcttccccaaagtaccacaaggggtaactcttttaatattttccttgacagatgcgtattaagtgtccactacatatcaccaggattttgcaagaattttgtcacactaaataaataattacagtgaaccgcaagttaccattaaatcattatcagtaatcactatctaaatcaagagtacatttccctactcccacatcataaattcttgagtctcctattattttcttctcttgaactcctgatgccattttttttctgaatttgtccagaatagggtcatgctttataatagcagcataagaagcaccattcatatttgactttgtgttgtaccatcaggatcgagggcttagaaatatatctgagtgaaatttcatgaaaacaggccattgaaaaaaaatgtgcattgtcaatctttgggaaacaatagaatagaaataaagatggcatattttttcagtttaatcaacctcgacagtcactattgtggctgccgaagcgggtttgattgccagttgttaaatgagcctgcatcccgaaaagtgagagtagatcactcagcagagcatcagacagatgatatttgctttaaagagagattaaaccagttccgcaaaggccagtgtcccactgcttccccaaggcagcaagtagaatctgccctttcctctgcattcttatttccaagacttttgcagaataaaacaagttccatcatcagtcccttgtccacaaatgtaaagacagtgataacacaaggaagatttgagagcaattgaggaagttgctgagaagtgtgccatgcctctcctgaactgggttgaccttgatgccatcaattgtttctggaaaattctctggtcaccagcccaagagaggttaaatgcccaaaaatgcctttattaactcactcagactctggaggtatatatgtctccatccacaggaaaaataagtgacgaagactctatttataggctctcagtagatgagacctactatctagtataattgaaaagaggacaaaggtaagtatccccccaaatagctctcttcctcctgcctggatccagtttttcacattagaattactgatggctgagagctgtggtgttcaaactttttttacagaactctatgttcaaacaatatcttaattggaaacccattataaaaagcagctacttgttctagcagaagatggaggaaccattcagaaccactcacctccaggcgatcaggagtgcctcagcaaccaaggactaggatttgtccaccaaaggactcgaagaagatgctctcattgttttgtcagttgagcaattcagtaatagctgcactttacaggatgtacattttctgccagaaactttgcctaatttttagttctcataaccaacatgtactctaggtattattaacaccattttataaggaagctgtagctcaagaaagattaataatttgcccaggttaagaggtatagcacggattcaaatctagatcagctggataattatttttgtggaatgttatcctatgcatgtaggatgtttagcagcttccctgacctctaccctctagatgccagtggcactgctacccccagttgcgatacctgaaaacatctccagacattgccagatgtcccctggggtaaaatcagccctggttgaaaatctctggcctagaccttgtccagagctgtagggattcattacctctcctaaataaagtaacttcagttcctttaggcaatttaattctgcaggcttacactgtccaatccagtagtctctagccacatgtaattatttaaatttaaatcaattaaaactacacaaaattaaaatattagtccatcagtcacacttaccacatatcaatctgttgtccgtagtccagaacctagaggctaccgtatgggacagagcagaatagaatatttccattatgacactaagtactataggagagcactgatgtaggcaaaactctgctaacacacaagtgaatatctggtatttggaagtgggagattcatcccttatgattccttagggggttagggaagaagacagtccctgaagaacttgctgtgctgactctgctgacaatcagcaagcctcccctccttggatattctccagtgtatgcaggaagagagcagcctacatgggctcagtgtctgcccatgaccttcatgaatgcagaaaaattgcagagacccttttgaagggaaactacagacctgttaatttcttcataaaggtcaaagataagcagatttgctacccacaggggaaggattcagggtaaggaatcctgggtctgactagaattggggaaaattagcaagtaagagagcttgaaaagtggttgaaaagaatataagaacacacatagaagacaatttcccaggtcaaatttgaaacgtgagggacaacaaccagatgcaggagcgtgagcaatcatgtagtcctcacaatttgttacagatatgtgcctttcatcttatcctacaaataatagggggtcactgaaaattcatgtttgtgtgttttattgcccctatggcacaaagacatttcattaacagtagagccctatgttataaccaaagaggaggccgctatgggtcacttgatgaaaataatggtttaaagacagttgtaaagaaaataggatcaccagatttaacaaattaaacaacaacaacaacaacaacagagtatccagttaaattttgaatgtcatataaacaacaaatgatttttagtataagtagattccatgcaatgtttggaatctacttatactaaaatatttgctgtttatctgaaaattaaatttaattgagagacatgtatattatttggcggccttaagagaaagtggaagacttgcagaggaaatgtacatcttcaggcagtgagaagggaggggcagtgatgatagaaaggaaagtgcatttaatttaatgaatataaagtctttaattgggataagggaagtctgaagacacaagagaaacgtgatttttgcttatttcctatcagagctgagaaaatgagagtcagcataattctcaggtacacttggttataaccaaagccaggaagttcagttcaatgaatgtattgagtgactcttgtatagcaaatatatgatgccatacactggagaactgaaattgtgaaggcaaaatcactgccccagagtaacttgctatcttgtgaaggaatcacacaatgcaaattgacattggggataaactggcgtataagtgaatctaaagctatgcacaataaatatgcaggagggaaccattagttctgctaggggtcagtagaactaatgggaagttctactgtgtaggtgaaggaaaggaagactgtgtaggtgaagtgatgctgaagctagactttcaggaatgcaggcaagagtgcacagcaagacttgtgaaggaacaggtgtgatcaggaacctggccagtggtcagtgatggtaggaatctggggtgcagacaggtgggcaggaagattgaaatatggttaaaagacaggctggggctggaaccaagtcattaggggctacagtctaggggcaaagaggaggcattcgagcagggaagtagcaagatctaatctgtaatttaaaatagtaacaatagaacattaaatggcagtatatttaaaatattttgaaattgtaggatgaaactttgtagttaaatatcttcttaatatctctttaaaatcatttcatttttggccagtttatgtgtcattcatgaggggagcaacagagaataacagttaagaccatgtgcattgggtcagttgatgctggaattgaatcttggctctgcgaccctgaagtcatcagtttaacatttgacatcaaccgtcatctgaaagacggcagaacaacagtccccataccccatagggatgtgtgagttttaaataatataacaaacacataaaatgcctgacacagtgctcaacaagtaaaaattatcatacattttgatagaaataatgaattcatttatttcacatttttacctggagctcatgcacctagctggctaatttaggacctccaacccccttgaacattgtgaactcagctgttcataggaacccaggaacctcttcacacatgttcacatccagttcactcatggccggtgctgcctttgccaggcaccaggttttgtggcaccatttcttctggcatcagaatgtctgctgctccactgggcatgggaggctccctggcttctgctgagggcacttctgtattcatggccccccaggactcctgaagctgtactattgtctttgctagtagttttgtttctagtgtgttccagagtttaatgaaattgctctttttgaattttttttccaattctgctctttatataacccagacatgtgtctgttaggagcttggcagaaaaagaaccaagctgtctccagaattgcccctcccctctaaagaccaacctgctgaggggttttggcttgcggcctataggactctcagtcacctgctaccaggagcgatgtctctcctgccgtgccctctccttcctcttcccaccaccccaacacactaagatagagtagggatcatggatccagtatgacttccctttataagctgatgctgcccattcgagttacctattgacaagccatttgtccctaaatagctacatcagagtattaccacacagggtgtatggtgatgtggggaggccgagtcacatttttaaaacctagttgcacacctctctaccaccctcctaaactatggagccacaacatattcattacagggtgaggctgcactaagtccaagtatgagcagggctgccctgtatttgtttcacttactgagtcagcgtgttccttcctttttcttagagactcaacagactcggggtctgtggcttccagctgaccggtaaatcacagacatatgtggctaatcattttccccttgcagtgtatttacaaagtcagcgtgccacatgtcccttgcattgtgctcccagctaccaggctatctgtgccatctgttgagatagcgggcccttgcttcacagtgctgggtgtatgagaagtcagtacagattggccagcaacctgagcaagagtaaacagacccctgcggggagaggccaacaggtttccaaatcatagtgaccctgatgagtacaagccatagacccaaaccctaactgaagagaacattgttatttgtttatttatttatttatttttgaggtggggtctcaccctgtcacccaggctgcagtgcagtggtacaatcacggctcactgcagcgtcaacttccagggatcaagcaatcctcctgcctcagcttcatcctctcacctcaggcctttagctgggattacaggcatgtaccaccaaagcaaactaatttttttattttttgtttttcgtagcgatggagtctcactatgttgcccaggctgttctagaactcttgggctcaagcgattctcctgcctcctcagcttccccaagtgctaagattacaggcgtgagccatgacacctagccgagacttctgtatagagaatgtgacccattagtagttttttatgagggcggtataatgttaccatgaaatactattcacaattgttctagaaacaaagggattttgtaaagagtgccaactagcaatgtttgggaatcttatgagaatatttaggatctcataggattgtcactggtaattattcctctagtcatgagaacgtctctattttgaggttaaatgtgttgtttcgcagttgttggatggaactcttacgtcattcacataatggtgcatccaattcttcttttctgaattctgttgtattgtgtatcatttcaaaggaaaaataatggttggaacatgtttcctatggtttctaaacacatgtagattcaagcaaataatagcaatatggacttaggtaaatcttactctgccagatagatcatactttaagtgtgaaagcatattgtttatcctttagaaaagtgaataataatttttgctgcaaagtggtataccagcacatttgtctataaatttacattcttggatattagcaaaattgcaagggaataacaggctggatcccaaaatcaatttgaaaaacagcaacaatgaaaaatcagggctagtttagataatgaagcagtgaagggagttgataggaagaaaaggaactctttttcccccccacagaggccattgctcatgccattttcttgccctgaagaattcctgaggaaaatgaaaagacaatggctgcatttcaagcgaagcccaggcctgggtgtgctgctcctcaagaataagatgtgcagaaaagtgccctttccatgggagcaatgccatgtctctgatgtcccccagcacaaagatgcaaaagtactctcgtcattttctttttggtttattgaaaatttcattttgttgcagtgcccgtttcccctaaacaaaactgtgttcaactaattctatttctaagacaagtgggtgttttaagtagttgatgtagcttcttgattttaaggacaacacggatacatcaagggtagagaaaggtattcaattagaatgtgacctttaacagcatagactcacaaagtgtttgacttgtttgggactttaaatatgatctgaaatactaacattttcaaaaaaagaaactatgttgagagagttgtggacatttatcccaaactcattaccttgtgtatgaaacaacagtaataaactagataatagatacagctacatacatttagccatgtgtccttctgtatatctcaagtaattaatgatgatgacagctttcttcattagaacacatggcttgcccagccacatgcacatatacaaaagtgtgtatgatacaggtattatgcatcttagatgtcatatagctactaattcaagccatattgcattcctatatcaaataaggcaacccacatttcactctgtgatttgttgctgctgatttatcaatttagtagatatgagttcatttgccagttgaaattgcagattgcaatgcatgcatttgaaaactttctataaaatgaaattggtatagtgtgttggtgaagctcttcttacttcaaatagagtaaaacttaagtgtatatttttaaacaattttcttaaaaccaggtacatttagtaactgaagtagtgtaactatgaattatcatccgtagaagtctttgttgacctaactcctcaggtggagaggatttgaaacagatagaagcagtttgcataaaagaaatgaacagtttgctctgaccatttgagacaaacgtcctttcataagaatccaaactcaaggaagcagcttcggaggtgtccttataagtacagatgggagagaggatctatatagcttttgggtgtgcacacctaatagagctgaactaaataatgtcgggtagattttgactttatatctttttcttttttgtcatcatttccattttttcctgcttcatttgttccttatgtctttggtgatgcatgagtagtattttaggattatgcctatcaaagattttttaaagttttaatttcagtattttctttactttgacatacattcaatttgttaccacagacttcagcggaagttaggacttgtctttatggcctatctttatactcggaagcaaattattcatcacgtacacttattctagcttttcctgtttgtgtaagtgtccatttgtccttagttccagccaacatttccaggggagtttcaaggtgacttcttccagttagatatgttcaaaaagtggccccaagatggttgtgtacatgcatgaaaatgccggtaaataatggcaacacaactttatagttgagcaatcctcagtagtttactaagtaaatatctctatcatatgagatctgttatcattcccgttttacaaatgaggaaaactgagacgtcaagtaattttgttacgtggtgtaattaggacttaaggccatttgtcctttctccagactaagtgacatggactatggactaatgacgcctttcgttatcattgttctgcctctttcaaactgtcaacagtgcaaaggtgtcacttccaaaccttgttaaaatgcagtttctgattctgtctcaggtctgggattatgcacttctagcaaactcctagcccttgatgcctgaaattccacacttacaacctccctgaatgctggtccactgaacacacattgaatcataaggcttttaacaatcttctgttcacacagtgaggtagcatagcacattctctggaatttcattacattttccagtctttattttttcagtgtggttaactgtcatttcttagcaaatttgtatgtagatatgaaagcatgcatcttcatacgtacgttttaaatcttaagaaatatttgaattgtaatcagtatcaataaacagaaatcattttgtttacaagtattcattttacagagtagcacaacagggataagtttagttaagtgaaccatacagtgggcaaacagtgctctgcaaagctttgccccccttgtggctgcaaactagaggcataaagaaaataaaaagtacctattcactctttacgttgtatgccactgctcagtttatgaaatcagatgggggtttgattgattctgagggcccgaccttgctggctatgtcctaagtggttgggcgttaagctttaagcctctagggagccatttacttaattgaaataaaaacaactccagcgggtttgtgttagcatttgctttagtcacaattctgagagaccctaaactaggaggtcaaaactatgtaggagtgattctgagagcagcttaagctcaaggaggttgttacagagtgaattgtacagagagtgaaaattccagaaacactgtgactccttaaccctgcagccatgccgcaatttgcctgttgtacactcatgcctttggcattatttcttggcctggaggaacaggatggcaaggttaattgcaaaggtggagtgttgggtgccaggcaggggtaggatgaatatgtggtttctggagcacagccaagtctactggtcccacctctccaccccttaggcataaggactagtgggcaggtttaattaatatcgcaaggagatgtgggaaccagagaacttgctgccctaggaagggagaaaagggactttgcaaaagtggaggacctgaggctctgacccttagtcttctgttgccagggttgaggtatactggtagcagaagagattacctgttatctggcaatagtggctttttactgaagtacctgaggtgaggtaggtggggtactgtaaatctctcctaaacatggctcacctgaaatatcttagtttttagtttcccatcttaatagggtgaagagagtggagggggtgagtgggaagaatggtgctatttttataatatctaaaattaaattaaactgtacttttataatttatgaccctgatttttggtacttttgacatttcttttgttgttatttttcgagacaaggtctcactctgtggtccaggctggagtgcagtgatgggatcctagttcgaactgcaacctcgaactctggactcaagggatccttctgccccacctctcaaatagctgcgactacaggcgcacaccaccatgctcagctcacttcttttcatttttttaagagatggggtctcactatgttgtccaggctggcctcgagctcctagccccaaaggatcatcccaactttgcctccctaagtactgggattacaggcacttttgacatgtctgttccatctctaacagcttaaattctgtctacatggtaatgactttgcttgtgttgggagcatgtacatttcaactcttcagtttctaatcccttgccctccccagcaatcatactagaagttgagagtagctagccagtgggccgaatcttgactgaaaccacatattattggacccacgaagttgattattattattattttagttgctaaaatttaaaaattgagcactttcatataataatccagatttccaatgactcttaaaaacttggagactcctctttctggggcctgccttgctgtgtagctgcccatagctgggactgcagagctgcactcgtctttaggctgagagtacactctccagtttgccagtcttaaccactcatcagcttggtcctctgctctcacctgcatttgagtttgtgacccctaatgcagaatagcttttgcaaaagcttgagatcatataagtgttctggcatgccttcagtgcagctgactaagctcaagagagctaagtgcgtcccaaactggccaaacccaggatacgtgcaaaaccatgtttctgacttctgacttcagccatctaagccagagagtacaggtgcagatttaagttatctggaagggtttagtacagagattgtgtttagctgtggatggctgaaaatctaaaataatagtcatttaaacaactgggcaatgcatgttcaactgtcatagaagtctggatgcatgggtcacagctgctatgagtccacaaccatcagaaatccacatttctgatgaggattgtacagcttcaagatggagcttctcttctgtgagttgagatgaatgcttcgtctctagccttctcttgctggcggaaagagaaaaagcatgagagaggcatgccttctccttctaaggaaaccctgtagacattgcatgcatccctttctgcctacatctcattggccagaacttagtcacatggtgattacacaatttccttcacaccaacctaatatttagctgcaaggaaggctagaaaagagtctttattctgggtgaccttgtttccaactaaagataagcaaggagacaatgaatattagggtgctactggcagtctttgcatggactgtgtcttgtggctgtaagatttcccagacgttgcccatagtgggcattaggtaaatatggtaggggtaaaggaaagatagggatcaagcctcagcgatccttacactcaactcctggttaccataccataaaccatatatactgtcctcattcctttacatacatctttcatttcattctttattcctgtacattttgctttgctttatcgcccaatgcaagtgtttcatctgtaattagccaagtgtttaaatgctatgcaaggtactatgaaagtatcaagagacaggggctccttcccacatggaaaggcaagtgtctcatcagaactcccacccaccatgaagtgcagtttcccaagctgatgtgcatggttgatcctggaacttcaccaactctggcaatatctctgttaatcttcatcataaactcagtctccacagtatattaggaatcagtgctctcagcctaatggtcttctcctggccaatgagcatagaaaaggttcctcttgtggttagttgtatgagaatttgaatttacatatcttcacttttggaacgggtgaagttaactcatttaaaaaattaattcattctttatatttttgtcaaagaatatgtgtaaggcctcattctgtttaaatattaatcaatttacaaaggtttacataaagctttttaaaagtaaatccatgggataagaagtatataagttgtttttttttttttttaaggaagactgagacataactctgtagattcaagattagacctccccctgccatacccaaatagatactctattcaaactattgggaatataactgattgtttcccaactgggacaagataatgaaatcacttgttgttcaataagaatagcatataatttgtccggaactaaccttctgaaatacaccattccgatggaacatgtatgcttttggttcttcaaataatatttttaggccctaaatgttaattaaaagagaaagtctcaaaccttcttgggagcaggtatctgagggtggtcttgggtctgcagagcatccagctctgatgatgacccttgccctttgcatctgggcccagtacttccatctctccttttctctctggctcccactcacaggcagtcctcggatgctgtattagggaacacaagaatttaagggggacaggaggcagcctacgttctgagcccagcctttcttttgtcccttgatcatttcagtctttttgcatatccccatgagcaggacaaaggaaaggaccaagacttcaaactggacttgaactcctgagaaagctacatctctaacaaaaacatttggatttcttttgtgtattttggagagggccatgatactttcatgcaacaagccacaaaatggaaacatacggtatgaggatcttgctatcctagcagatacgcagatacccctcttgcttttaaagaaataaaaggaaacaatacctttcatactaaaaatgagaacaaaaaaacaacctagctaggaaaaaaattaaaactccatagtagctcctagagagacatttattcacacatttatttttaaagaagaaaagaataagtatgtatagtgagtggcctccagaagcagctgtttaactttctccctgtttccctgcatctgcaagcataaccttgttgtattcaacatctgctctgcagtttctcttgagagctgtaataggatactgggtcttcttgtcattctgtaagatgagttattttgagggaagaatacttagggaattccatataaaatactggtcttgcaatacccatatagctttttatttttagtttacagagtttaaagatcatacgtagttttcattaatcccattttgcagagagaaaactgagggatagaaagttctgtcaactgatcacatggtagataaggacaggactcctcctttttgatcaagggccttttataaacgttctgctatattgttttgatatttccagttattttctgagagtttgccacaaacagtgacgtgagaaggagaaacttttaaaatgatttttgttctgaaggagtccataggcctgccaacccagcaaaatgtgttacttataggcgtaaaagcaatcctaccttttaactacacactaaggaccacccagctgcttggccagagaagtaggatcttgggaggtgtttgggtagatgttattttaagtgccatagaaccttagactattacagctggaagtgaagatcttccaactcaactctttcattgcgcaaatgcaaccgcaaccacagaggtacaatgaatcccccagaccccctgctaagcactacacaaagcccagtcatggggttcctcctgatgcttcctcaggcattttctcctgcattaaaaaaacactgataaatgtgccaaccaggaaatgcgtgtcagccaagttttctgattttcctgatttacatgatatctgcaaaggatttttagttatccactaagcagctccctaattgacataataccagtcttccttcttttcttctgctttttgctcttattctttaaaatgtatcaaattattgttaataacacattttaaaaatatctgctgagaatcacaatgacactgcatttgtgtagttataaggtagactcttggatttagggatacattcctgttagcccagcacatatacacccgagggctcatggtttttgacccacaccatatttcatggcatgtagttcagttgccccggctgggttctcctatcacaaattgcaagactctcatacagggcagactcagtgagcttacctgtcttacctggcatgacaggtgaaaagagatgcttacaacaccctgggcctagaacagtgtctgatacttgtagcccaatagagtacatatttgtgaatgaataaatgcacattgaaactctgcctttgcaaggaatttgagtcaacagcatcttagcctccttgactaagccactagtattttgcttccttcacaactgacagctttactggagtctcccggattcttcaagcatgtcaaggaatattttagtcgcttggatactagcacactgttaggatagtgggtccagatcactgattccataatgattctgagagattcaaagccatttctccccatcagcgtgtgagcctatcactaaataaacttcctggagtcaagacagtggcggcacccacacaccttgcttctcttcttgtaaccatggcaacacacttgctctcttgcccgccccactctgctctccatcaccacagagctgctggcttaataaagcctgacaaacttaaacaatggggatttctggccttaaggccaagatctttattaattcatagcagccgtaaccattgagctggccttgcttggcattcaggaacaaattccccaccatgattgattcctaccacctagtatcagctcagcccttccctttccaaaaatcaatcagtcaatcaattgattcatctattaggggaaaagattaaactatttaggtactgaataaaatttgctattttgtctctctagaccaggatttctcgatctcactgagtccaagaatgagcatgggagagtcatgccaaggatgcttggcttccagtcagagcacagtatatatttgcttctgtctggtagcctcttgcccttgacttcactgcatagtcccctcccataggttcactgaactgctatacctctgcagaaaccacccttgtaagacatctggatgagagctgagtcaaggcctggaggctgtctgcattaaactgggctctcaccatagatggctaaaggcggacacagctggagaggctcctgcaaattgtggctgaggtggcagcggttctggcggcaactttgccatctctaagcctcccagcccagaaccaaaagataatggcatgccttggagcagaagcagctgatctcattacccttctggtgcaaacagggcaaaaccattcaatatctcctatttcttaccatataaaccccaagaccccatgacctggctcctcgcgtgcctacctctccccagcatctcttatcactgtgtgattgtaatcttctccctctgctatgaagagttgtatattgttttctctctttttctctttttatgtgcctggaccttgttcttacagttctattgacctggaatgctctttcttctttccttccttttcatccttcaaaacacaccctaaatgtccaacaagaagacagtggatacatgaattactgtggtttgccatccatttctccctgtcagggccaaggcactcacccaccagctgtcaggagtgttgaccactgactgttcacagctgaggccctctgctcttagagccttgggttgaaggaagctgctttgcccagggttatatgaacccacatccagtggccagttcgtgcaagggtacagaggcttgcacagctccaaagggccaccccagctgagaactaccccctggaatggcctgaagcctccatttcaactgcaccacatcctaagctctccctctgcccaaccctgcctgtcttgcttccttacaggcagcaatcaaagcgtcctccccagcatgtaaacctctatttcagagtatgtttcccaggtaacctaaagacaaggcaaatctaggaaaaaataatatgtaatcattaaaatttttaatttatgtgttaagaatatttcatgacatagaaaaatgctcaagttaatgaagtaaatacaaaaacaagaggcaaaactgtgcatgcgttatgttcctgattatataagaatataatgacaaaaagaatgagacaaaaaaggaaaaaactgtatcttttcaggaagaactactcctaaaatagaacacagattgtgtatctctttagaattttgtttccgttttctgtttgttttaaacattctacaatgagcaactaacattataagatttaattaagtcatttaaaagtaaaagggcataatattactaaacgaacccccacaacacaaaatacataaacaaaagtctaactaactcaccatcaggggacaaatgaaaaacttcagcttccatggtcattctctgtgctatgttccaatcatatctgcccctgtccaagtccataaagttgaatacttccttttttgttcaaatatatatatatgcatctatcattacattttaccaaatggtactgcaaatatttaaatttgtcgcttataatacactgagagttctatgaggatagaaaatcatgttttccatgccttggatgtggcctccactctgtaaacactcaatgtattttatagatgagtgaatgagggaatgcatgaataaatgaatgaatcaataaagtaacatttagaggctaaaagcataaagaatttgatgggcatgggggcaaactactgaaagtaaagcaaaaaaatgtagaaagaagccttgaaatcccaattaacatttcctgattgcttcagaatagaatgctgtaaaatgagaggctttcagcctgtctgcatttcagttctgtgcagcttacaaaggaacctgggaaaaagctgacattgccactgtagctttgaggctttcaagataagcatcagtttgggttcagaagaaatgaacagtgatgaatattgtcttcagcttcacaatggtccttttaattcctgtcattctcaaaaagaaaaaaatgccagtgtttcttctggaatattttcaaatttctccaattttaattttggaaaattgcatttgaaactttcttgaagtagtcttattctctgccctttccatcctcatctataattactaataagtagtctctttcttttattaaggtaaaattcatttgtgatataattcaccactttagccattttaaaatgtacaacttagtgttgcctttttgccctgtgtttggcttcttgaagtgacaatttagccagtctttttgcaaaggcattaacaggttctattgagctgacattgcaataatgctcctgggtaatacatttacattttaataagagcattgataccttaactcaaagaactaacttaattcttttattctctctatcattttgaggatatgggatcaaatttgttagcaatatacataagaatctttgtagactggcccttgctttcaccatttcctcttctatgaagcactgcactgtgatctttttttttttttttttttttgagatggagtctcactctgtcgcccaggctggagtgcagtggcactatctcagctcactgcaagctccacctgccatgttcacgccattctcctgccttagcctcccgagtagctgggactacaggcgcccgccaccacacctggctaattttttgtatttttagcagagatggggtttcaccgtgttagctaggatggtctcgatctcctgacctcgtgatccacctgcctcggcctcccaaagtgctgggattacaggcgtgagccaccgcgcccggccaaagcactgtggcccggccaaagcactgtgatcttaaggtatgctcaaatacttaaacttcttcaagtaagctgcattctctcttgcctttgtatttttttctttttctgattggaagatgcctacacatccttccttaaaacaaagtccaggcattatgcctgtgaaatcttctcctcttctcccttttgctcccctcctgccctttcctcccttccccttttcttcctcctttctctctctctttctctcattctctaggcaacttcacatgccaccagttcaatgttttccatattgccttgtagttatcaatcccattgttttctaataagattgtaaatgctttgagcataaggactgttttcctatcttcactgttcaatggtcttgaaatgcaatagattctcaaaaacatttatgaaatgtaaaaaataaaagaaaaaaagaagaagaagaatctcacaatgtttagaaatccctggcagactggtaaaggagaatttgttttttgtatcgtagtacctgtttaagcacccttcacgtaactgtctacagttaggactatacctgattaacagtatttgcctggaaggcatcagaggagtagaaagctggaatgcatacacccttgaaacttttctgatactccttagagaacatgcaaactattaattagatacatatcatgacaatgtgtatcttacagcattgataaacctgaacattcattccagcctgttttattcttgtttctcttgagcttcaacactgaatttatatttgtaacacctgctgtttccatcccaggataatagactatttagcattttatcatttccaaagtataagaattcacactctacccacccctagttatttgatatggatcttttctgatggccccctggggatcattctgtggtctaggctacactaccaaggctgcaggctgtcacaccagtatataaactgaaaataaaataaagagaaagatgttcagattattgaaaacaaaaagcaataatgaaaagtatgggactagatgagggaaaaagaggagagggagagggagaagaaaacaaaacaaaacaaaattatagttgtcttagtactcaaatctttgttgcccagtcttccatgcagccttcctcattctaagctgacatgctcactgaagccttcagtagaatgtgagggctgggttatccaatattcatgtgcagaatagtcatgtggtaacttgttcaaaatgatggattcctagccatgatgctgatttctgacttaatttctctgaggagtatctcgggaatttacctctttgacaaggccccagatgattctgttagaggtggtctgatcagtgaaccacactttgagaaacactacaggaccatcttttagcctgactgcattaattagtactttatgctcaaacaacaggcatatattagctcatgttttattgtgggttggcaattggaactgcattcagctgaatggtcctttcactggtattgcctgagcttgctcttgaagctccaagtagctggtggctcagctggggctggatggttaaagttggcctagtcgcatgactggtaggtacccagctgttggtcaatggcacgtcatttctcctccatgtggtttccacaccagggtagcctggacttctttataggatggtctcaatatttccaacaggaagaaaaggcatgccccaatgtgcaggcactttccaagcctctgtttgtattatgttttctaatgtccaattgaccaaacaagtcatgtggctaagtatagaattgaggagaagagaaatgaactgtacctcttaatggaaagcatggtaaagtcacattgagaggaatagcaggattacagggccatctttgccaacaatcttccacatctattagatcagtaaactattgtgtctgataatggttgaagaaccagattttatgaagaatttatactttaatatataaattagtgcaaatgcaagtttatcctccaagtaaaaacccttttgctgacttgtaaatttcactcaaaaagaattttttttgagtaagaggtcagtggacttatggccagtatgatgggaattgtgcatagtattgaatagacccatggaaaactatagccctgttaatgttatctgccttgaattacttgtcagaaaaaaaaattaagtactgtggctctggggacctggggggagattaagtaagggggacagatgaggatcttctggttcactgcttttggcagaagtcgatatacctagtggtaaaggccattgtatctgcctgtttaggttccattcttggacttctccattctattttttttttttttgagatggagtcttgctctgtcaccaggctggagtgcagtggcatgatctcggctcactacaatctctgcctcacgggttcattctcctgcctcagcctccctagtagctgggattacaggtgcgtgccacaacacctagctaatttctgtattttcagtagagacagggtttcaccatgttggccaggatggtcttgatctcctgaccttgtgatctgcccgcctcggcctcccaaagtgctgggattacaagcatgagccaccgcacctggccccacttttccattctttaactgtttgccttcgttccataaattacctcatttctccataccttacagtgttgttgtagatttaaataaaattatgcacattgtaaaagctcacaaagcatcagctatcatcatcttcattatcatcattctagaaaaaagtattgctagcataccatagctctctttacccaccttaggagtggatagctacctaaagaatgtacactcagagaagtccttgctttcctctttccaattcctgaaataacttaaagattgaccaacactttttatttcatgagaataggagagaatgactttacccaaacttgttcctgttatctacaggaacttggtgactagtactcccactacagtttaagggaaaagctactgtggtagccagtgttcaggatgggtaccaatgatccctgccttatggcatccagacttttgtttaaaattaccctcacattgagtagagttgacttgtgtaactcaaaaagatattacagaaatgaagtgtacagaagcattttagtgtgatgtaacctcatttgtctggttttgcttttgttgtctgtacttttggcacagcaaacgaaacaagcaacagattgaagagacaacctatgaaatgcgaggaaatattttcaaaccttaacctcttacatttgacaagaggttaatacctaaaatataaaagaaattcaaacaatagcaaaaaaaaaaatcaatagcacaaaaacaaataacccaattacaaagtaggcaaaggacttgaatagacatttctgaaaagaaaacacacaaatggccaacaggtttatgaaaaaatgttcaacatctttaatcatcagggaaatgcaaataaaaatcataatgagctatcacctcacactttttagaatggctgttaataaaaaatgaaaaataagtgttgatgaggatttggagaaaagggaaccctttaacactgttggtgggaatgaaattagtgcagccattatgcaaagtagtatggagatatgtcaaaaaattaaaaatcaaactaccatatgatccaacaatgccactactagctgtatatccaaagtaaatgaaatcagtatgttgaaaagatatatgcacttccatgttcattgcagcgttattcacaatagccaaaatattgaatcaacctcagtgttcatcagtgaatggatggataaagaaaacgtggtgtatatatacacaatagaacctattcagcctttaaaaacaaggaaattctttcatttgcaaaaatatagatgaatctggagaacagtatgttaagtgaaataagccaggcatagaaagaaaatattgcacgatctcacttatatgtgaaatctaaaaaaatagaactcatagaagcagagaatagaatgatgatgaccagggactagggcagtggggattgggaaagtattggtcaaaggatgcaaaatttcagttatataggaggaataagttcaagagatctagcatacaacatggtgactatagttaatgtattcttgaaaattgctaagaaagtagattttaagtgttcgcatcacaaaaaaatgaaaagtatgtgatataatgcatatgtaaattagcttaatttagccattccacaatgtatacatatttcaaaacatcatgttttatatatatttcaaaacatcatgttttatatatatatatttcaaaacatcatgttttgaatataaacatgttttatatataaacatatataattttatttgtcaactgaaaataataacaccaaaaatcatatctggaaattattctggtgtgatttgttttatctttcttaaagtacgtatacagaatttcaaatgtggattgccgtaatgttgtttaaggaaaattatttttatctgcttatttccaacacaattcctgatggatttcttcctcactgctatctttaactacacaaataaatgtcaagatattcaaaattttacacaaaatgtatagaaaaggagaataaaagaagggaagtgtgactttggaggctaggtcataaaagacatcgcggctttctccctactcttctggatccctcactctggggacagccagatgccatgtttgaaggctactcaagcaaagctgtgcagacttccatgtgtctagatcctaaggcctcttgtcaacagcaagtacaaaccagccaaccatgtgagtgagccgtcttggaagtggatgctccagctccagtcaagcctcgaggtgacttcaactgtcaccgacatcttgaccgcaacctgatgagggaccccaggccacaactagtcagctgctccctgacttctgatccacagaaactatgagagatagtaaacatttgttgtttcttcaagcctctaaatcgcagggtaatttgacatgcagtgataaataacgaatatgcttgttttgatatggggaagaggagaaagcatagatgcgctggcagatggaaggagagaggcaggaaaaggacccagcaggcagaggctgaggatgccaaagagcaacctcacaacctcacactgttgcttataagcacagtactggaggccagtgtttttggaagaggaccagcagaatggagtgcactaagtgctttgaagtacctagagagcctgcagggagtggcactaggtaacagggaggtcatgcttctcctgtttatcatcttggccattaactagagcaaagctctttgtgggaaacatgcaaattgctgaaaatggagttgaatttccttcatctctctttaactggaaatataattgcaactccttgcacattgcatgaatttttttaaatcctgtcacgctttgttggctcactgcttttcatcttaatgtttattaaaacagcccaagttccctttgatgctgaaagcccaagtatgtgattggagaccattgccaaattacaatgtattttttacttgatactgagttttttgactgttcatttttaacttttctcttaataacttgagagttggagagtgagggtaggaaaaaggaaaaaagtcagaaacagtgactggccagtttgaaaccctttcctggactcaggaacctgatagttatttccaaaacaccaccacagacatctcacatgttttcgtatgagactctgttcttatacccctgactagtggcagatggaatgagccatgatgcgtggtccatggatggatgaaaagatatgttacattttcctaatggaatgatcaaggacctaacacaggcactgcattagtcaggattctccagagaaacaaccaataggatatgaatagatatagaagaggagatttattatgactaactattatataggaggccaaaatgtcccctgataggcttaagaactaggaacacaggggaagcctaaggctgggggcaactgaaaagcattagctccaatgtccaagggcagagaagatagatgtcccagcttgagaagagagagagaattcaccctttttccacctttatgttctgtatggaccctcagcatattggaagctgccctaatgcttgtgcacactggtaaaggtagttcttctttactcagactaccgattcaaatgctaatctattccggaacaccgtcacagagacaagtaggaataacattttgccagctacctaggcatcccttaactcagttaagttgccatataaaattaaccatcacaaatctaccgcttgtcagcatggtactcacaaacacttctttttaaatcatactttatctctaaataaaaataatagaaatttataattccatctaacatgatacaaccatccgccatacgattgaaaatgtactaattccttccccaaaaaagaaggtgaaatctttgtctgatcttttctcttgatacaccataacttcaatattatgatgtgaaattaacaatgcttaaatatttatataaagtcaaaacatattatgtgataagggaataagagaggaaataaattgaagagatttgcttaatatatgtacgtgtgtgtgtgtgtgtataaattcataactaataagaaagaaatactcatgtcagtgacagtcctcctttctgtaaatggccatggctggtatttatagctaccttcttctactatgcattctgttccctttgccttcagcaagcaccttaacctgtcatgcatttttatgtggtaggttgacccaaatctttatgcctgaagggtctgggctattcgtacttctgtctggaatgtgttgtagtcttcaattcactttaatcacagggcatggtaatactaaactaagagatcttctatattccagacatattctttcttaccctgactgtggatgagtgctacaatttgccctggttagtctggatcaatcagcccagccaacactgtaactcccttctcagtctattcactcataggcacatttaaccctttagagtagtgggtgagatgattctaatttgatctaactaactttgcaataaagcagagatgggtgctccagttttcctgaaaaggtagttttgcatttgagtctaatttacaataagcgggatgatgcccaggaagaaatactacctggatggtttccaaaaatgttctatatgaggggattgtgagtgagaagtgtattagtttcctgtggctgctgtaacacattatcacaaacttggttgcataaagcaacagaaatttgttttttcacagttttagcatccagaagttcaaattgggcctcacacctgtaatcccagcactttgggagctgaggcgggaggatgtcttgagcccaggagtttaacaccagcctgagaaacacagtgagactttgtctctacaaaaaaataaaaaataaaacaaaattagctgggtgtggtggtgtgtacttgtagtccaaactacttgggaggctcaggagggaggatcgcttgagcctgggaggtcgaggctgcagtgagccatgatcacaccactgcactgcagcctcggcaaacagagtgagaccctgtctcaaaaaaaaaaaaaagtctgaaatcagttccattgggccaaaatcaaggtgtgagcagactcatactccccctgaaggctctaggggggaatctcatctcctttcttcttccagctgctggtggctacctacattccttggccatataactccagtctctgcccatggtcacattgccttcgctgtggtctctttgtgtcaactgtttctctgctctcctcttataaagatacatgtgtttatatttagggccctaccaaataatgcagaataatcttcctatctcaagatccttaacttacttgtgtctgcacagactctttttaaaaatcaggtaacacttacaggctccagggattaagaactgatagatttgagggccattattcagcctattacaaaaagtttcacatcacttcattccaaagcctaagccttgctctactgcacttcaatattttcctcattggtgctgtattctagttgttattatatcatagaaagaaaaaaagtttttgaaaaattagaggacaaactcattaaatggaagaattgtaacaagaaagaaaggagagatagtaacaaagttttgctgaaatatacctcctccctattccgtgccgtcaattgtagcatcccgctctgttgaatgtcttcctttgaaagcttctctaagtttttactttgaaatgtagatttggttacccattcagaaattgccatctcacatgtttaatcaagaccttgtctgtcattgttgcccactacaaagttttatttaaccctggagtgaatttactgttctactcctgctgtgggccccgtgaggtggtgtgtggacctgagatgaaaaccacttgatgtgtggttggagggtaatagacttctctcacccagactgataagtcattacaggcccttacatccaataaatctgagctgattcccagcttgcacttagtgtggcggaggggagagaggactgagggaggacagagtcttttctaaaatgctgttcaacgttgtacagagtacttggtaacagatgagctcatcggcaggggttggagaatggttgttgaagtggtggcacatttggtggcaaaggtggtaccacatgtaatgtctgctgcagacataacagaggaattctcggatttggggaaaacttgcaaatgaaaatagtaaagtttatctcctgcagagttattggaagagaacaagagggaggcactaagactcagattaagaggagaaaatgttccaaatgctttggcaaggggatcttacatattggcagattttgacccttttcagagtcatgcaatgcttcttaagctggagtctatagatagacactgagagctccacaaattctcaattagagaaacactggctttaaaaatagtgtcaactcttagcctgatatctcaatgtctcccaaatctagctccatctgcccctcttagtctacttttctcgcctccagttttccaatttgggctactcagcattccacaagacatctcatatttggtactttgcacagatcatattcctgctttaaaatgtcacctaccttttctcctcttttccctcccccacccccagtatgtccgctgccaaaagttccaagccctgctctggttctgccagtttcttggtgctcaactctctctcctgatttctgtagcacttaagcttggaaaagggccttctggggtaccccactgctccgtatcacttttattttctatttgtttaatgtttaagattttgtctctgtttctcctgtcacatatttctcaaaaactgcatgcttactgtaaatacatagagtaacttcatttccatttttggaagttgaaaagccctgccactaagacagggctctggggagcttgccctccacccatccactattccaataccattcaaggtgcagtgctggtcctgtcccacctattccaactaaaaccacatgtcatcagtgaattattgtgggcaatgcaaaaagggaaggtggagcagagcagcgatggtgaagagagagaatctgtaagaaaatagggagggtcaagggccactgagaaacctgtgatggtaggtaacagagaaagacttccaagcaggaaaacgaggggaaaacgagggatgttccatttgatattattgtttacattgttgcaagtagaacatcccccaactcagagtcaaaccttctgttaagtcagtatcacacatgtgatgtatgagtctattttcgtgcagaaattaaaggaaaaaactggttttcatatttgaatcaatcaaagtgaagcaattatcgtgagtagaagccagaagctttctacaaaagtaaagatgaaatagtaagcactgaaaatatttggagaaatgtgggtttgtggcataaggttgcagccagtcttctctacatctcatggggaaaggagatgccgggtggcattttaaggagttcaaaggatttggggactaatcaaagaaaaaaatatgaccacaaggtggcagtggtacacacaggctgtgttaggcactttgacaggtttgcaggcagagaggttccttgctgtggaagtctgtcctgagggtaagcgcagaggtcccagttcagaaaggaaaaagggcagagatcatcagagattgtgtatctaggtgatgtcactgggcagcacagcaggggatctctgtgtctgagtgctcagaagggtagcagcagcttgagatctttacacccagagcttatgttatctgtggctacaggtgttgggcacagatttgtgaagtgtgcaaagcaagcaaactccaattcactgaaaatctgcttatttgggcaatatttaagataattagatgtgtaaaaatttgagattgatgccagcaggcttttgggctaatgggtctcagcctatggtgaagaaacacagaacccaagtgccagtgtgcaggcgctctctggtttgttcataaaacaaacctctctctctctctgtcacacacacacacacacacacacacacacacacacacacacttataggattggggtcatatcacatatgttgttttataacatttgcaataatatcttaatcatttttcaatgtcattacagattcttctgaaacattcttttttaatggctgcatattgttccatcatgagcttctctcatgattaactaatcctctatttctgatattttctaacagatagtccagtatttctaatattgacctacgggtatgtagtgatggagtctggggctttttgcttccaaacctgttttggattcttggctttactaagcaactgtttagctggggaatcaccaaatgatttttgaaaataatgttaggaaaaagacatttcattcaaattctaaaatatttaattatggcttgatttatttagtatttatttatttagcaacatgatgtatggcctaagcttatagattggttttagtcaaaaaacaactgtgctcatcaaataagcccattatgcaaagcacactccatcatattgggtccctgaagaatcctagttttgaggtaaagaacagacccccatctggctacatgttacccatctgcaacaaatcaccgtgacacaaaacatttaaagaggcagtagttgtattaggaatggcatttccccattttgaaagatgtaagtaaaaacactgtttaacatctgaagttcatttgcaagaagagtagatgagctagagaaggtggcagaatgacagtgtgactcccactttcttcattgtgtgtctgtatgcgtgtgtggggtgaaatagagggcttatacatggcaagatatgctgcaggaacaacacctgatcaaacaacctgagtcctgtactctcaatgcagttgcagtggtgattctcagagctcttccccctcagtgaccatttgtgtattagacgctgcttaaacctaaggggaaataaggagcaagagaacaagatgaggttcaaatggtctatgccagacaacttacaaaacacatttctctacataattcagtggaatcaccccaaataatactgcaaattgtatgtctccaatgttcagattagattaggttactaagccttacaaatatcttagtgactttctcaagatcctggctgaaccctatttgaacttagatctgaaacttcaaaatctgtgctacttctaaaagattatacagacaatttgtcaattagggaagtccgttaaaactactgtgtacatgaacatttgaccttgattcgtttctattaggtctgtccatatcccttcccttactgttttttttctttttgttgttgttcttgtttctcctttggtgtttgcacttctatccctgtgtgatgggaagccccttcattctgccttttgtctgtcctgggaaggtcatcagataggtattggaacttgaaatatttcagctttttcttctatcatccatatcaagatacctgtatcccatattcctaagccatccatcctgtaccatctaagatgttagggcaaagtggcttttgatatacactctatctcagcacagaacacagtggtcaagaggagttagctgtacctgaattctactctgggctctccaacttactagccatttcactcttggcagttcaattctctcttagtgtctcattttcctccattgcaaaataaggtgataatagcgtctacctcctagggctgtgtaagggttaaatgatgcactgtgtataacttgcttaggaaaatgcatagcacatagtcatcaaaaaataactgttataaaaataatatttatacatgtataaatattataaaataatatttatacatgtataaatataaatatttatacatgtataaatataaatatttatacatgtataaatattataaaaataatatttatacatgtataaatattataaaaataatatttatacttgtataaatattataaaaataatatttatacttgtataaatattataaaaataatatttatacttgtataaatattataaaataatatttatacatgtataaatattataaaaataatatttataaattaattatttttattatatgctgaaaccacctgtgtcttaggccatcactctaatagacttcattgactatgaaatgcttactcatcactagttacaagcatgtgtaccgaatggctggagacaatgaggaaaggagtgctaggtagtttaaggactttaccttctgccagctaaggacctactttggaaccataagaaataaatacaactttttttgctgttttcttactgtatctggctccctgataagaacttatcaagccctcttttcaaaaagcctcaatgccacaaagtcctccccaccttctcaaaaaggaaatctacaagtattcattgaaggcctcttcggtgtttagccttgtgccgggtctagggaatggaggtgggcttctaagatggcataggttttgggtttctcaacttacctacagactttttgcatcattttttccttttttttttttcttttttagataggatctcactctgttgctaaggctggagtacagtggtgcaatcacggttcactgtagtcttgattgcctgggctcaagtgatcctccctgctcagcctccctagtagctgggaccacagatatgtgccaccatgcctggctagtttttctttctttattttgtaaaacagagatctcactatgttgcccaggctggtctcgcattcctgggctcaagcgatcctcctgccttggcgtcccaaatttctgggattacaggcatgagccactgcacttggctttttttttttccttaatcatgctctttgtggagttgtcccttgcatatcactttgcccctctcactcattacttctgacttgggtcctgttcatactgcatcttgctaaataattttataagccttataaccaagtagacattctctccctaatgcaaatatatagcccctctatgttctagaactcacaacaagaaaacagagttgctaaaagataaataggagatgctttaaaaagttagagacccaccaggagattgagaccattctggctaacacagtgaaaccccgtctctactaaaaaatacaaaaaaaaaaattagcgtggtggtgggcacctgtagtcccagctacttgggaggctgaggtaggagaatggtgtgaacccaggaggtgaagcttgcagtgagccaagatcacgccactgtactccagtctgagcgacagagtgagactctgtctcaaaacaaacaaacaaacaaaagttagagactcactaacatgactaaagttaaaaagcttgataatgccaagtactggagaggatatggaacaactgtaactctcatatatttttggcagaaatataaagtgatacaaccttcttggaaaacagtttggcaatttctttgttaaacatacatttaccgtagtacccaacaataacacttttaagaaagtaaataacactttaagaaagtaaaataaaaactatatatttagaatgaattatacattaattgttgtggcacctttattcataatagctccaaactggaaacaacccatgtaacttcaacaagtatgaatggataaataaattatagtgtattcacaagatgaagtattagtcaacaatttttagaaaaacaacaacaactagcggttaggcgtggtgtcccacacctttaatcccagcactttgggaggccaaggcaggaagactgcttgagcccaggagtttgagaccagcatgggcaacaaagtgagaccctgtctctattaaaaaaaaaaaaaaacataaacaaaacaaagcaaaacaaaacctacggatacacataattaaacagatgaagctcaacattttgctaagctaaacaagccagtctcaaaagaatatatactgtattattttacttatataattttttaaaaatatccagactagtctgtagtgacagaaggtagattagtactcactggcagctggaagcgagaggagcactcgtgagagagggcacagggagcttcttggaaagatggatgtgttctatatcctggttgcaggtgtggttataaaggcatgtagacttttcaaaacttaactgaatgggtacataaaataagtacattatataacttgctaaacatagtaaatttttatgtagtatatatgaaatatattaaaacaagactagcaattcagaaaataaaaggtagggaaagattccacttgtcctacagtaaagatatccagaaacatgtgaatctatccggtgtttatttgacgcatttagttttgctcttagtcattttttcaaccatttattaaactgactagatgctaagtccagtgttaggtgcataacatacagagatcaaaggtgactttgtaaccacagaacgtttgcagttttggcaagctgacgagcttgaaaatggttgcagaaccattttctgttgaaaacgcagaacttcaacaggaagtgcaggggaccatgggtgtgcgggagaggggcatttaactgggaggaccagtgaaggttcctggaggaggtgaagtttgatttgagtactagatagagaaggggatgtggatgctccaggaagaggaaatagctcctgcaaagccatggtgggtgtggtgaccagcgaggagcagaaaagtggacatgggtcatgtgattaagcatttcaagaggatggtatgtatccattcagctttagaacagccccgcgggcatctgtatggtgtatgggttgcagatgtcgctatgatcagaggctgggtagcaaaccactaacgtaatctagtagtggtggtaagaatgaaaaaataggacatttgaggcctggcctcttctggctctttgtgaaatctaacaaacatcttccagctccatctggtgctgcttttttgttttgttttgttttgctttgctttgtgtgtatttgtttgtttcattttgccaggggcatttggtgctcagcccttaccccctatgttttgtgaagcatatcttattctccaggcatgtcttattctccctcccttttatcttgtcctgaacacaggctagggggatgacatggtttccttttaggttttagaagaaacaggagtcttatttgattcctcctttgaaagaactgctgccatgggtgatttcctcattgatgcaaagaaactatgctttgccctacctttgagagcatttacaatagaaagtctacttactcttccagtgaactgatatatacttagtctctgccctgtgtctgggacgctgtgagatgctggtgaatttgctagctggcgtgatggattgtccccttacttctctgctttcactccccaacagatgattattgttctcctgtgcaaaggactgtgaggacactttgaaataaaaaggtagtttctgccctcacctgacatataatattaaagggaagacaatatggctgcctgataaagcaaaatgggaaaagcaatataaaagaggtagaaggaggtaggtggagtgttacaagtgaagaagaaagctcacccaggcagtagtgaccacattggcctggctgcccctgcagagaaaagatttcataaataccatgggagctcctactaagcactgtaatttctgttatgtgctgggaataccaagaagaaagagagatagccctgcctctaggagctccaggacacagattagtcttatcaaatgagtccggctgggcgcagtggctcacgcccgcagtcccagtactttggaggctgaggcgggcagatcacaaggtcaggaaatggagcccatcctggctaacacggtgaaaccccgtgtctactaaaaatacaaaaaaattagccgggcgtggtggcgggcgcctgtagtcacagctactcgggaggctgaggcaggagaatggcgtgaacccgggaggcggagcttgcagtgagccgggattgcgccactgcactccagcctggcgacagagggagactccgtctcaaaaataaaataaaataaataaaataaaataaaataaaataaaataaaataaaataaaataaaataaaataataaaataaaataaataaaataaaataaaatagaggccagcctctttaatttcagttattattgctttattgcctaaagtttaagatgatccatctgcgttgtagaatcaggatttgattaaaataatgatttgagccttgcacgtcaatgggcctttagaagttcactgctccaggttggtctgaaggttcaagtgtggcggagactggttcccccagtgtcctccaggctgcctctttgaagtgtgggggcatggcagcattgtaaagtgtggctggtacaaaccaaataaaccttaagtttaatttggagtgggaagaacagaatcattaaaacaatcttgaaaaaggaagacaaagttggatacttaccctacctgactttaagacttacagtgaagctgccatactcaagacactgtggtactggcgaaaggagacacaaatggatcaatggaaaaaaatggaaagccaagaaatagacccacacatacatggtcaaatgatttcgacaaggacacctcgacaattcgatagggaaacagccttgacctgtactttactaaatgtacaaaaatcaattcacggtagattgtagagctaagtgtaacagccagagctacaaagctagtaaaagaaacatgggagaatagctttgtgacattgggataggcaaagatttcttagggataatccagaaagtatgatccataaagtgtggttgagacttccctgtttagagagaactgtgttgcgagcctgtgtacacatattttatttggagacctgattcattgattcatcctggatctttcctatttgtagcacatcaaattcatatgcacagtccccagtgacctttgttttaaaagcttttaaaagcaagaactaaatttcaacactgaagacaagtcagacacaaacctccatgtattttaaagtctagtctctagtatatatcaagctgtattataattaaaatctccaaaatcaggacacagcagtctagttgtgaaataaactgtcagaaagaaaccactcacaggcgcacacattctcccacttaaaaaaaaaaaaaaaaaaaaaaaagaaatgcttgccgtgttgcagatacatgggacatactttatacgtgtggaaccagttatagaaatgccgtttgaggagggaagcaaggaagcaataaaaacagtacattaatattttaaatgttggttaaaaaaaaaaaaagcgtggtcgggtgaggagcaaatgcttaaagaacttccccttaataaaaacaacattcttggttatgtgacccacagcaaatcggcttcagctgcgtttttatttagcaatttgtgtttggtgttttcgcttagagatgctcccctattccattttatagcaggctttacataaatttcgaggaggattggggtataaaactgtcaattcccagcagctcataaactaatgaatttaaattttaaatgggggattttaaaacatgggggggctgttttcgttatctgatggtatgtatctccaacaataagtggcaatctataaacgctggggtggctcccttcagaaacatgtgataagaaaagtctctgtctctctctccctccctccctccctccctccctttctgtctctcactttgttcttttcctgtaaaatctcaaactccaatgaacttcagctttgcaaaagacatgatataagttgctttaaaaaattgatttggcctggagaaactttattttccctcataaagctctttcttgcttacctttattgtttaatttcactttctttttttctctattttccatccaagttactactccgctaagacaatctctctctctctctctcttgctctctttctctatttctgtgtgtgtctgtgtttctctctctctctatctcctctctcatctttgaaaaccaacaacatagccaagtatcctgtatagaagcacttttattagctgaggaaataattaataccaaatccatatttgaagattgattattctagattttgggacactaaaggattgcagctagatgcaggagacaaagtatatgaaatttctatttagccttaagtctggttttctttgagtgctgggtgattatattaatattgtggtgttggaggacctaagtgtaggaattaaagggtgtctctccagagggttccaatatctggttgctctgaacgtttggtgaaatttccatttcaaaccaaatggaaatgctttttgagtcatattttgtcatctgatgctattttttctagttcaataactttagagaattaatgggatttctttttgtttcaaatagttcactatttttggtggtttcgtttattttggtttcttgttttccattcttttaaaaagtattctaaacagactgaggagggtcagtattggcttctctgatttggtatccccagtacctagcagaatgggagcataacttatggtatgtacctcataatgttttgttgaatgaacaaatacatgaaacagtacatttcaccaaggaatttacaatctaagaagaaaattcaaaagttttgccaaaaagattttttggcatctatttgcctgaagtccagtgctttttacttacaggttcttgggtaaactccaggcaggtgcatttggtcggtgggtgacttctggataaatgagatggtaatctatttggattaagtttgggagagttttaaaattcaaaataagtggatgtattttattaaaaactatttctatctccaaacaggaagaaaaaattgagcattaaagttatctttattagatgaccagaatatgatgtctctgtgagggtcaagttgttttctttacttctttatatgctatagctttaaatcacttttaagcaatggagtttccactgtgtcacctgggagacaattgggtgttgtaaccagtatcttaattagatcatttacagcacatttgcattacagggctgtaatagactgtgccctgtgatttcttgcactcaaaaggtaacctcccatgctccatattgaattgtattacaattattattaggttgtccctatcttataaaaaagcaggggtatagcttcttgtttcaggaggtgttttgatttttccatcactgaaaaaatataaggttttcagttacctccctccttctgttctcatgtgggaaatacccctggaacctggacattcaagacatggtttgccttgattctctggactccattatcatgaatagactggggctgtgaagtcattggcagaatgacattcaaagtttcaatctgtatcaaactgtctcatcttgcaaatagccactgggaattttaaaactagtttcctcagtactagttttgaaattcccaagccagaatggatctagactgaaacattttgttacgggaacattgttttaatctactaggttctattaactgcttcagtaggctgcttggttgccacagtagcaagctgagaagagatcttcaagactctgggtcacagaagagagttagaaccattaaagtttctgtgtttgcctgcaggggttaggaccatgcagaagatgggcatgggtattctacgcatctccagtcaaattgaacatattggcttaatgtctagggaataaggcaatgtcagagaaacatgaaagaaggaagcattcctgtattctcttcattttcaatgaggatgttcttgaagagtcatttttgagaactttgtcagagtcaccagccttgctggaatattcttacttcaatatgtgtataattccatgtggtattatttgagtaaggaaccttgctatttcttacttcctatattataccaggcttctttaccaaagtctacactgtattttttcattgtgggttaaaggcaatacatttatgaatttttaatattcctgtcaagatcttacaagaagaaattactttgtgaggtatgtagggatgctaacagtaggttgggaagtggatcataatctcaaaatagtaaatgctagctcggtggctttcccacagagaggtaatgtatcttgatgagacaagagcatttgtagaggagggtttatttgcagctcttcacccactgccttcctctgcaccaacccaatctcctgggctcccctggaatcacgttctctaagtacctccttaggtagacctgcattaccaaggacaagttaaaagtctctttctttgcccttaatctgttgtttgtaatgggatttaggagcaactcagaaaggagtgacaggaactattgagaagttgacacagggaaatagaaatgaaatcacagaacaagaaagcaggaaggcactctagtaatcatctggtagaaataccacccagtgctggaactgtttctgtgacatttctgatagatgtcctctgttggacattttcattgactcagagcacacacaatgcttcttacaggcactgcattcttttgttgtggagttctaatttttaacaaagtcctttttatttttatctttaattgactccaaatctctcttttaggatgtccaacccattgcccttggctcattatatatgacagtactcttctaagtccgggaacacacaatcagctcgtattgaatttgtcaaagaaaacttcgggaattataataagtagttattatattgcttactgacttgattaatgaaagcaaatttctggagaaatcatgctttctacacacctccaggatggtataagacaatcttgcatgaatacattaattaactacttagggaattttctaactgattatggtttattttacttactctctggttggcagttcctgaggcacttatgtaaataagcaaaggaaatggtcaggggaattacttatattttgcctccgcctgtgatgttctgtgatgttttaggtacaggaatgaagatgaaaaaaaattgtgaaggctagtttggctcccaagacatagcactgaactatgacgaacaaaaggaacattacaaggtggagttttgataaaagtgggattcctagaagaagcagatagtagtatgtgactgttgtgaaaaacgtttgaggggtaagttgaggtaaaattgatagaagaccttaaatggtagaagaggaactcagatatctttttatgagcatggaaaacacattctagatgtgtcagtgagaataggccaagttaaggtgaaccaaaatctttcaaatttcaaagttttgatgcagcagatgccttcttaattcattttccatgaccaatattggttggtaagggctctgctcatcacagttgctcagtgtagtcttatgtcctcaactcatgttcctgcaatcagtgggagaaggaaatatggcccataatgcacttgtcccccagagcttcctccagaaagtgtcaaacatttcctctgttcacattgtgttagccaaagcaggtcacattgccatgccgaagttaaaagggcacaaggacatcaaatcttaaccatggtgcaaaaagagaacacaaacatttccgaatagttctagtaactttcacttcagagcacaagagataaattatggggaaaaaaataaggccaatggtggtgcacagttatgtatgcacacctgtattcctgaggcatgtataatggttgaattctaaaggctgagtgattttgaaaaggcatagtttgtttaaaattttagagggatttactaaagccattatttcatcctattttctgcatgttgtctgtctctggatctttttttcaagttctctggcttcccctatattgatgagttatgttggagtgatatggagaaggggctttaatgaccacttttaaggttccctctttgtgtcagttgtgctcaatatttgtattaatgacttgtattaagtagagaaaagagagaagggtgaggggaggtctgatgctgactaaatctatgtaacgcaaaagactggctcagagagttaatacagcacaaaattcaaattgatcttgatgggacatgtatgcctacggttaaacttagcaagaaagtatagctctgtatttagatgttttgtaaatcacctatatgtgcagatatttgggaatatctgacttgaaatcagtgattctaaatcctcctcagagccatcatgttgttacaagtaatagaagacaataaggtgatttggcaatctaaaaaaacaatactttcttgattaatgaatttgacccaaatgttgcagattctggcattagtgggtactcaaaaacatgtatcaaacaaatgaataaatgaattaaaacaaggacaagtatttcctaggtttccaaacgtaacacactcatgtttaagggcagttaaagttccttccttctataggaggaactcagttttgttctaaataaccaaaggccacacagacaacatatttctatttgtgctgatttaaagtgttgaaaaaagtgaaatgcaccaagataacaagcaaactaatgagatggtaaactggggtcattataagacccaattaatttgatccagaaattcttggtcagagacttgattgtttggacacctccttgtgatatgtggaatcaaaatttgggaagcagcaacacagtgggcaaaagggctctgacttaggaatcatggaattgggcctaggctttatcatttactcaccttaggaccccgggcaaggcatctactccctgtaactgaagttactaaattagccctagctaacttaggttattaagtttatctataggcaaaggcttgaaatgtgtagattggggtgaagcctgccctgccaacctcacagagcagtggtgggagctaagtgagataatgtacaggaaagcactgggtaaattgcaaagccttttacaaagataggaagcattatgaagacattttccaaatggcctcaagaaactgatttggttgtgcaacataaacataccactgggaggccgcagttaccagagtctctatcagagacttttcaaaataaatgcagtgactcaaatgtgtttccagatgatgctttgaggattactaacagagcagctattacaaagcagtcagacccaccggctcatgcatgccctaatcctattataagacagaccagataccacttattttgctatgtcaaccttcctttgactgatagtaacaattgttaggcctgttataaaaggcaggctgaacagtgggaaggcatttcacagtgagtcagcaattatagccttgcaaattctaattgtctacaccttcagggtgtagacagttgtgtcactttctatgtatatcctgaaatgagtgaaataaaactgaaaacctaagtgatataggaatacacaggtacagaacatcactggacaactcccatcaagttgaatattatatactgagaaaacaggtaggaaggtgatgtgtgcaatatatgtctgtttccattaagaaactgaggtccaagctagttacaaggaaacgggtcaaaccagaaagtgtaacagcttaatccataagcaggtatgcaggtctgtgtaaatacgggatggatttttcttgtgaagtgggtctgaggatttttatgtttccctctatttcaaagtagccttctgggtatagggaagttctctagcctgtgtgggctgctctctggagtgagcaggtttggcaaccctgaggaaaatgaaagttctctaaggtagcacttctcaaatattaatgtgcatatacatcacctgggcatcttattaaaatgcagattttattcagtacgtctgggctggggcctgatatctgcatttgtaacaagctccaaggtgatgcccatatggctggtttacagccccctcttggagtagcaagggagctgtcataattccagttctagcacagaggtgtaaggcagacttggtttattcctctctctctctctctttttctctccctagtctcactttatcactctatctttgatacaactgaaaatagtcctgaagtcttaacaagaaggaatatgaatgggctgaatcacgtattaatcacttcagcccttgccgaccacccagttctcaggggcaaggaactaccagttctgagacccttcttgttcatggaaaggtgactgtgctattccagcagcacaagaaacattgaacctcagaaagtgcccctaagttcagaaaaactcactatttaagatgtaatcatcctaatatcactgttttggaggagaaataaaattcctggttaagctagagttgataagtataaccaataataataatacttgttgtttattcagggctcattctctgctatgtgttttactgaaatcatcttattaaacccatatatgattcctacaaggcagacaccatgtagttatctacattttatgagtgagacgtctgagcctggaattaaagcccagcctccgaacctcactgctacccttcctgttgacatgaccaggccaccttttagcctaaggctgtcttgtcccttattggttatttgcatgactaaatactatgggtttagcatatgtttgtggaattagtgggagtagacatatttattcaacaagtctataatgtatctttaaatataagctattatattgggaataaatataatatactttctgttgtttgtttcttctttaaaaaaatatttgcctcaaataggtactgtggttattattttggttttgttttaaatcaagaaggattatatgcacatagatgctcaattggtatttgttcacttatgggagaaaaagaaagaaagaaggattgaaaggtgaagttgttcagcaaagcaagagttgtcacttgggacactttatctttagaagaagaagaacactcaacatgtttgaaagaccctgagactttggcttaaatcgctgttaactgagacctacagctcttctgttagtgtttctttcctgtcagacagaggtttctgtgcatatgacgttcctactcctgcttggaaatttataatagacaacagcaaattggagagtgtgatcagtggaggggaaaataaacccatttcactgtgtttagctcagtgtttcccatcctgattacaccagacaaacattcatgcgtggaagacctattatcctctccaggaggcccatgaaaagttctttggcgtgtaccactttagaggaactacttccccctccttagctggtttttctgaacctaattttcctggtgggggcttcctgtaaattctggatctcacagtgtgtgccagtttttaaaatggaatcttctagaattgtgggagcaaaagtgggaaggttgttggaaaatgtagagctagacgctaaagacaatctatattctcactttcattgagggcttctctggaagccaaagaaaggagtccctaataaagcaaagacataagtcaaaggaaaaccagggtcttagaatctcggtttcttctttagtgccctccccttacaacctgcgctcccttttgcattttgggggttctctggcctgtatgctaaacttgaccttgaaagctctctcttccttccaaccaattacgctcatagatacttttttttttattttaacggtttcacttctttcaccatagtgaaataaaagaaacaacaaaatgcaaaaaaaattagtaaaattagattaagaaatttatctagcggtgagcttgacctgtagtttctgactcagttttgcagtgaaagcatcatttggcctcacccactgccttcactatgagtattgtcagcaacttaccaccccattctgctttctcatcagaccttgctttagggaagatccaagggactcttttcccagtgtcctcatcttgccagccagcagctacaaactttaccaaatgaacaaagaaattattttgtgtcaagtgagaaatgtggctctctagggccctccaagctggaggactttcatttccccagctctccccagttctctgcctttgccaagaatgatgccttcaggtgttttctgtcacccagtcagggtgttaaaatgttgggtctctataaaacattgttgatctgccaggatgtgggatgttcattcagggtgtcctcaagagaggtctgtcaaattataacttagaagttaaagtatagagatggtggtgaccatagtagagaaagaaaggaagtttcactctctctctctctgtgtgtgtgtgtgtgtgtgtgtgtgtgtgtgtgtgtgtgtgtttgtgtgtatgcatgtgtgtgtctgtgtgtgcatgcctacatgtgagttttgcttgtggaacacacagtctgtgtgcttgtatgtatgtgtttgcatatgctcaatgagtgcttgtgcaggcccctgtggtcaagaagacatgactgaactaaataactaaagaatagacagacagtctgcttcctgctactacaagcaccatcaaaggaatacagtacagtgaacacagggctgtcctggactgaaaagtctgggaaacactccctttgggtgcctctggtaagaatttgaaagttagctgttgttcatttcttcttagcttcagagcatgaggacgcttgtgaaatacgtagcaagtggctcatggggctctttccaaattgagttaggatgtgtgttcagttcttgaacctcatcttatgcagtgtgcacttgtgtgtgaatatgagctcaaaatttccataaaagaagtttatattagaaaaggtggaagccttttcagggatatgcaaagatggaattgacaacaccatgaggctgaaaatagtcatgtctaggttggatgattccctgcatgagtatagtagaggtaatccaaacatcacataatgaattgagcctgtaagtccttttccaaagctaagattctagtttttatatgtagctctatctttaagatgctctttctcattttttttacattggattttctggagaagatgaagagaatgtcagtaatggtcacgagaagaattatcagcagagaatgttttaaaattgaaagtactatattgctttgtttaaaatgtttggtctatttcatgtcttcacagagatttggaattgtattaacatatgagtgtcagagaggtatagtctcatctaaatttcagcattagactccaagtagttttaaagtttgattaaacatgcttataataattagattcaaagcttttggaattccagcagttttttgaaggattcagcatctaatgaagtaaaataaattgcagggctcttggtcagtgaataagcacttttgcagctaagagctacaatttatcaataggactcattactattcgacttgttttctagccttctttgaaggtttaagggccattgtccactcacacatcaggtttagtcacaggctgttatgaaaagacataattagttttccaaggtctgcaggaccagattcagttttggaaaatgagctgatatgatggtttgtgccctgtcttatcagtcaaaaatgctaagatgtgtaggacagagaaaggttgtaaaaacgattagagaattctgatgatagctgtggggatttgggctagagccagcaggatactctccgcctgcagtctggtataaatcaggacaaaactgaacacctaggctagagttaggacagagtcccggggaccaagtcagactgaaggggtattatgccaatgacatcagaaggaaatgccagaagagcaaggtgagcctccctagcctcatttcagctgtgaggtgatgggataccaggaacattagaaaaaatggagcacgaaatagtttcaggtttgagcttcaagacaatattggacctatgaagccaaatcaatcagttgatttcaagaagaaggactggacaagacaggagcatttcctaatcaatttatgcaaaacctctgtgaaacaggatcctctggccatccaaactgttgttttaagttaaatttttgttttaattttgatgctcttagacataccccatgtttgttacctttgttttctctttttattagccaaaaagctttcttgtgctcaggaaatgtatcttatttacttttgtgtctctagcaatcacgacaaatgatcattattaatagatgtgtgtgtaaattatggctcaccttgcatttgaactgcctccacgtttgctgggattcccttttagtggagttcctctaagcctttctctcttgggtttctcctctggagacaattagacagtggcctcctagaacaaggcagttcagccgttgtaactctgcacaggtgcaaataagtagttgtatagcaaatatttgtcacaagaataaacttgcattcctcatcagtaggagtcaaagagatagctccctttgtagtgaatagcaagtaaaaacaatgttctaaattcagtagaaaaaaacaggcatacacccgtcacctcagtcctctccttccctgtatcttgaagctttcccatgttctcaagctttcccttgagaatgcggtttaagaatctgggtggattttctttagagtgatgaaaggtttagggtaagaaactggcaaggtgtgttgacaattcctgttcagtgacatgagaaaagaactgttaagagcattgcttcatttcaacatatcctttttcaacatagaagactgcccatcccaccctgctaacctttccaggaagacaagatcattgccatggttacaaactgcttaatcaatagtctgggaaacagtagcagccactgcttactggcctagctgctgccaaggtctctcattgaggagaatgcatcttcttcttcagctcccattgccatgacagcttctattccatccagaggttcccttggatgggataaaataaacttagatgatttgaaaaacaagcattaagggttagatagcttattgtaaaactcaaatcttcatttaattatacatgcatattttataaacaatttaaaatgctaacatgaagataaggatagaggcatttgttttaagttattcttgaaagaattgtttcaattctttttttttaaattttattattatactttaagttttagggtacatgtacacaacatgcaggtttgttacatatgaatacatgtgccatgttggtgtgccgcacccattaactcatcatttagcattaggtatatctcctagtgctatcccccctgctcccccaaccccacaacagtccctggtgtgtgatgttccccttcctgtgtccatgtgttctcattgttcaattcccacctgtgagtgagaacatgaggtgtttggttttttgtccttgcgatagtttgctgagaatgatggtttccagcttcatccatgtccctacaaaggacatgaactcatcattttttatggctgcatagtattccatggtgtacatgtgccacattttgttaatccagtctatcattgttggacatttgggttggttccaagtctttgctattgtgaatagtgccgcaataaacatacgtgtgtatgtgtctttatagcagtatgatttataatcctttgggtatatatccagtaatgggatggctgggtcaaatggtatttctagttctagatccctgaggaatcaccacactgacttccacaatagttgaactagtttacagtcccaccaacagagtaaaagtgttcctatttctccacatcctctccagcacctgttttttcctgactttttaatgatcgccattctaactggtgtgagatggtatctcattgtggttttgatttgtatttccctgatggccagtgatgatgagcattttttcatgtgttttttggctgcataaatgtcttcttttgagaagtgtctgttgatatccttcacccactttttgatggggttgtttgtttttttcttgtaaatttgtttgagttcattgtagattctggatattagccctttgtcagatgagtaggttgcaaaaattttctcccattctgtaggttgcctgttcactctgatggtagtttcttttgctgtgcagaagctctttagtttaattagatcccatttttcaattttggcttttgttgccattgcttttggtgttttagacatgaagtccttgcccatgcctatgttctgaatggtattgcctaggttttcttgtagggtttttatggttttaagtctaacatgtaagtctttaatccatcttgaattaatttttgtataaggtataaggaagggatccagtttcagctttctacatatggctagccagttttcccagcaccatttattaaatagggaatcctttccccattgcttgtttttctcaggtttgtcaaagatcagatagttgtagatatgcggcattatttctgagggctctgttctgttccattggtctatctctctgttttggtaccagtaccatgctgttttggttaccgtggccttatagtatagtttaaagtcaggtagcatgatgcctccagctttgttcctttggcttaggattgacttggcaatgcgggctcttttttggttccatatgaactttaaagtagttttttctaattctgtgaagcaagtcattggtagcttgatggggatggcattgaatctataaattaccttgggcagtatggccattttcacgatattgattcttcctacccatgagcatggaatgttcttccatttgtttgtatcctcttttatttcattgagcagtggtttgtaattctccttgaagaggtccttcacatcccttgtaagttggattcctaggtattttattctctttgaagcaattgtgaatgggagttcactcatgatttggctctctgtttgtctgtttttggtgtataagaatgcttgtgatttttgcacattgattttgtatcctgagactgctgaagttgcttatcaacttaaggagattttgggtgagacaatggggttttctagatatacaatcatgtcatctgcaaacagggaccatttgacttcctcttttcctaattgagtgccctttatttccttctcctgcctgattgccctggccagaacttccaacactatgttgaataggagtggtgagagagggcttccctgtcttgtgccagttttcaaagggaatgcttccagttattgtccattcagtatgatattggctgtgggtttgtcatagatagctcttattattttgagatatgtcccatcaatacctaatttattgagagtttttggcgtgaaggttgttgaattttgtcaaaggccttttctgcatctattgagataatcatgtggtttttgtcattggttctgtttatatgctggattacgtttattgatttgcatatgttgaaccagccttgcatcccagggatgaagcccacttgatcatggtggataagctttttgatgtgctgctggattcagtttgccagtattttattgaggatttttgcgtcaatgttcatcaaggatattggtctaaaattctctttttttgttgtgtctctgccaggctttggtatcaggatgatgctggcctcatcaaatgagttagggaggattccctctttttctattgattggaatagtttcagaaggaatggtaccagctcttccttgtacctctagtagaatttggctgtgaatccgtctggtcctggactttttttggttggtaagctattaattgttgcttcaatttcagagcctgttactggtctattcagagattcaacttcttcctggtttagtcttgggagggtgtatgtgtcgaggaatttatccatttcttctagattttctagtttatttgcatagaggtgtttatagtattctctgatggtagtttgtatttctgtgggatcggtggtgatatcccctttatcattttttattgcgtcaatttgattcttctctcttttcttctttattagtcttgctagcgatctattaattttgttgatcttttcaaaaaaccagctcctggatacattgattttttgaagggttttttgtgtctctatttccttcagttctgctctgatcttagttatttcttgccttctgctagcttttgaatgtgtttgctcttgcttctctagttcttttaattgtgatgttagggtgtcaattttagatctttcctgctttctcttgtgggcatttagtgctataaatttccctctacacactgctttgaatgtgtcccagagattctggtatgttgtgtctttgttctcattggtttcaaagaacatctttatttctgccttcattttgttacatactcagtagtcgttcaggagcaggttgttcagtttccatgtagttgagcggttttgactgagtttcttaatcctgagttctagtttgattgcactgtggtctgagagagagttttttataatttctgttcttttacatttgctgaggagtgctttacttccaactatgtggtcaattttggaataggtgcggtgtggtgctgaaaagaatatatattctgttgatttgaagtggagagttctgtagatgtctgtattaggtccacttggtgcagagctgagttcaattcctggatatccttgttaactttctgtcttgttgatctgtctaatgttgacagtggggtgttaaagtctcccattattattgtgtgggagtctaagtctctttgtaggtcactaaggacttgctttatgaatctgggtgctcttgtattgggtgcatatatatttaggatagtgagctcttcttgtttaattgatccctttaccattatgtaatggccttctttgtctcttttgatgtttgttggtttaaagtctgttttatcagagactaggattgcaacccctgcctttttttcttttccatttgcttggttgattttcgtccatccctttattttgagcctatgtgtgtctctgcatgtgagatgggtctcctgaatacagcacactgatgggtcttgactccttatccaatttgccagtctgtgtcttttaattggagcatttagcccatttacatttaaggttaatattgttatgtgtgaatttgatcctgtcattatgatgtcagcaggttattttgctcgttagttgatgcagtttcttcctagccttgatggtctttacaatttggcatgtttttgaagtggctggtaccggttgttcctttccatgtttagtgcttccttcatgagctcttttatggcaggcctggtggtgacaaaatctctcagcatttgcttgtctgtgaagtattttatttctccttcacttatgaagcttagtttgctggatgtgaaattctgggttgaaaattcttttctttaagaatgttgaatgttggcccccattcttttctcgcttgtagagtttctgccgagagatcagctgttagtctgatgggcttccctttgtgggtaacccgacctttctctctggctgcccttaatattttttccttcatttcaactttggtgaatctgacaattatgtgtcttggagttgctcttctcgaggagtatctttgtggcgttctctgtatttcctgaatttgaatgttggcctgccttcctagattggagaagttctcctggataatatcccgcagagtgttttccaacttggttccattctgtccgtcactttcaggtacaccaatcagatgtagatttggtcttttcacagagtcccatatttcttggagtctttgttcatttctttttattgttttttctctaaacttctcttctcacttcatttcattcatttcgtcttccatcgctgataccctttcttccagttgatcgcattgcctactgaggcttatgcattcgtcacgtagttctcgtgccatggttttcagctccatcaggtcctttaagtacttctctgcattggttattctagttagccatgcacctaattttttttcaaggtttttaacttctttgccattggttcgaacttcctcctttagctcggagtagttcgatcttctgaaaccttcttctctcaacctgtcaaagttagtctccatccagctttgttccattgctggtgaggagctgcattcctttggaggaggagaggcactctgatttttagagtttccagtttttctgctctgttttttcctcatctttgtggttttatctacctttggtctttgatgatggtgacgtacaaatgggtttttggtgtggatgtcctttctgtttgttagttttccttctaacagtcaggaccctcagctgcaggtctgttggagtttgctggaggtccactccagaccctgtttgcctgggtatcagcagcggtggctgcagaacagcggatattggtgaaccgcaaatgctgctgcctgatcgttcctctggaagttttgtctcagaggagtacccggccatgtgaggtgtcagtccgcccccacgggggggttgcctcccagttaggctactcggggatcagggacccacttgagaggcagtatccccgttctcggatctcaagctgcgtgttgggagaaccactactctcttcaaagctgtcagacagggacatttaagtctgcagaggttactgctgccttttgtttgtctgtgccctgccctcagaggtggagcctacagaggcaggcaggcctccccgagctgtggtggggtccacccagttcgagcttcctagccgctttgtttacctactcaagcctcggaaatggcaggcgcccctcccccagcctcgctgctgccttgcagtttgatctcagactgctgtgctagcaatgagggaggcttcgtgggcataggaccctctgagccaggtgcgggttataacctcctggtgtgccgtttgttaagcctgttggaaaagcgcagtattcgggtggaagtaacccgattttccagatgccatctgtcacccctttctttgactaggaaagggaattccctgaccccttgcacttcccaggtgaggcaattcctcaccctgcttcagctcacgcacggtgcattgcacccactgtcctgcacccactgtccggcactccccagtgagatgaacccggtacctcagttggaaatgcagaaatcacccgtcttctgcgtggctcatgctgggagctgtagcctggagctgttcgtattcggccatcttgactccaccccccgaattgtttcaattcttatggtggttaaaaaacacagattcattaagaataagtcctgactaatttagttagttttctttttctaccagttttaccatttactagctgagtttttagtagcttagttttctggaccccagaaaaagctaatgagatcttgggttgcattaataagtacaaagtgggcagaccaagggaggagatagtcctgtatctgcttagttacaaccctgcatgttggaatacattgataaactggcagatataggaagaaagtgagcaaagttgtgtagtggtcagaaatcctctcttgcgagaaacaattgaagcaaccaatttcattcatcctggagatgaatttacttgggagaaccatgttaaatacctttggagttttaaatgactggtatgtaggcaaggggctgagtattaatgtaatgtcagaaggctgaagaagttccaatgtggtgtgtggtcaccaaaatgcagattgcagatcagtttagagaattttcagcaggttcatctaaacttcgtatttctggtgcctccattataggaacaattgccaagtttgcttatgtttttactctttccttcaaaaaaaaaaaaaaacatttatcaaactgtgatctggagacaacctgctacagattcacggggtggagagatggaagatggaagaaccaagagagacagtaaaaaatcatattactgggcccgaccctagaactatagtatcagagtctttgggtctgtggccattgaatctttattttttttgttgttgttgagatgaagtcttgctctgtcgcccaggctggagtgccatggtgcaatctcagctcactgcaacctccacctcccagattcaagcaattctcctgccccagcctcccaagtagctgggattacaggtgcctgcccctatgcccagctacattttttttgtatttttagtagagatggggtttcaccatgttggtcaggctggtctcgaactcctgacctcaggtgatccacccgccttagcctcccaaagtgctgggattacagatgtgagccactgctcccaaccatgcatctgaattttaaacaggctttactgatgcttactaaagtttgcagacactataggtaatacatcctgaattctgacaagcagatcgttcttcaaatactgctttcgttcctggttcaacaatttacttgttagctttctaaggtttaaattcctcaccagtagttttagtagccttgataatcttgtctgtctcactttttaaggttctctccagccaccatcttgcctgtccttcaagtcttggtatcttcacagaacgtcttcaagcattttctatttactatatttgttttttttcacacattctgaaatcctcctagtcaatgtcatgagactactcttgaactttgtgagttccactatcacttggggcatgcaggtcttctctctccaacaggtaagaggggtctttgaaacacccggcatagtgcccagctcaaggtattccaggtgtttggtgcttaaagccacattttaggctgtttatggcaactcttcgtctgaggcttgaatctcttgtatcaagtggttaatcaaagttcagcactctcatcaacattggtggaaaccttcaaccttctgagcatacatcttccacctccagctttggagaagttggacctgagacattttttcattttgagcaaagatcatttttccctctaacttccagttgtcagtctaggagtctgctaagtcttcatagaacatatttcataaatacctgctataaaaacatccctttgtttctcataagcctcattaaacttactcttctgatgtgtttatgggacttctggctgttgtaagtctgattagaaaggagaggattgtttgatatgaaataaagtatccaagtgaaatgttgtctttttacttttttgagaaatatctagtggatatttcagaggatttaaaatagctcttatgtttccctacccttagcatattaactaccacaacaaaaagatttggaaaatgtccattttgatgcatttccatttgataatacattcacagtgaacattctaaaatgctttgtgattgccagatgacaggcccacactgtcaacctaagttctgtaagagccaaattgataacattgaaacagttgacactgtacattatgattttaatctgccaaaccatctcacactgactcctaaaattaaaaataaatatcacacctatggcaattttcacttgagctgattcttttttattatttttatcttcttctgaaactttcattcagaaacctgaagtgaatacatttgtttaatcaagtctatgcgtgatagcctaatcccaattctcctcctaatagcgaaaggaagaatcattgaaacaaaatggtttgggcagtaattcaggtgccatccttcatgtacagaaatgtgttatcagcgggatgcttgctttacatctgtcctctgcagcagaggcggatcatggcaaggcagcatggcagcatatctcctctctggctcctcctgtgatcagtgtgtatttaagggacagttaattgattagagatacaccagacaatggaatcttctttgttcttgagtttcaagtacatagattcccaagggtgtagaaatatgttggttcacttcctcttcaccaggttggcaagggagggagtctcaccctagggttctaggggtgactgaacgtcctagactagggaagtctgctcttgtagattcttataggaccatgcaatgtttctgcatgtgatgtctcatagctgttaattttaatttttttgtggttattttattcatttctggctcccctatcagcaaactgggcacaggcaccatgtgtgtgtggctttgctccctcttgagttgcagtctctctgacagtacctagtgcccgatataaggttagtaggcaatgagtatttgttgaatcattgaaggcatccactcagtattacaactaatgtttcattccaatctttctcatatcttcctcttcccagaattgctgtctgattcaccctctgagtgtgtcttgactcatgttgacagtagcctccagaaggagaatccttccaccttggccttgtcccatatgctgctgccagactcatcttctccaaactgttttgatcatattgctctccaggacaatctggccaatgcttcacccctacaggtccctggtgcttccctcgttctttgattcctcctgtaggcaaggcctgccctatttctcagcaatccaacctgcaatccactaaatttgtttatttatttatttatgtatttatttagagacagagtcttcttgctctattacccaggctggagttcagtggcatgatctcagctcactgcaacctctgcctcctgggttcaagtgattttcctgcctcagcctcctgagtagttgggactacaggcatgcaccacacacccagctaatttttgtatttttagtagagacggggtttcaccatgttgctcaggctggtcttgaactcctgacttcaagtgatccgccagcctcagcctcccaatgtgctgggatttcagatgtgagccactgcaccctgccctagtccactaaataaatgtaaaaagcaactatgtgtcagggacgatgggataaaagggtgatcgtgacgtaggcccttccacagactggatcatagttcaggacagtggggggcagacctagagcaaatactgcaatgtgacgtgagttctattccagaagcactaccagtgctgcaagagtcccagtgagtgaggtcggagagcagcttcagtagctcctgctcatatgtgggggccatctctgcactgtcccaccctggcattgacctacagtcacatatactgagtttcctgtccttgatttttagtacctctttattagtccactccagccaccataacaaagtgctgcagacttgggggcttaaagaataaaactattttctcacagttctggaggctgaaaagtcccagattggggtgtcagaaaatctggtttctggtgacagctttcttctggcctttcaaacagccattttcttgctatgtcctcatatggactttactttctgcatgagttcacagaaatagaattctggtgtctcttaatcgtcttagaaggacacgagtcctactaagttaaggccccaccctaattacctcattttgcccgtattacctttttataagccctgtccctaaatgcaggcatattggaggttagggcttcaacatatgaattccaagaggggtataatttagtctataacaatccaagtgtaaggcacctgctatatgaatcagctctgactgcctgcaagttagtatccccatctaaccagatgagcagtccttggcttctgtgtgtctactaccaattcataggtgttattttcatggtgtgtgcacacacctgagtgagttctacacagtcccagtgttgtctgtaaccctaggcagcttaaataatgttttgttttgttttgtttttgattttttgagacagagtctcactctgttacccaggctggagtgcagtggcgtgatcttggctcactgcaatctctgcctcccgggttcaagtgattctctcgcctcagtctcctgagtagctgggattacaggcgcctgccaccatggcggctaacttttgtatttttagtagagattgggtttcgccatgttggccaggctggtctgaaactcctgacctcaggtgatccaccctccttggcctcccaaagtgctgggattataggcatgatctctcataactgttaattataacagctatgtgaagcactgtgcctggcctgaataatgtttttaagcctcacttttctcacagtaatactagattgccaatctctcaggcatgttggggggattgccttcaataacatatgcaaagcgctagaatgtgttcaaacatgtacttagctccgctcaagagttggttctccactcgaatcctgcccttgctactcttatttatcagctaagcttttggaggacaatacttatgctttctcctatccctctatctttctaataaagactcctgtcccaaaggcagatagatggaatgcctgactgaaggcaaagtgggatgagagaggagagagaacaaatccaaacagcaaaaaggagcagcctacagggaagcccctattgtccagaaaatgctacagagagtctctgtttggtctttgcagccaagaacgctaaaaaaacttctaaccgacaataaaccattcccactggcagaatacaattttgtttgttgttacactagtcattcatgaggaatatctttgctttgttctgggtcatttaccttgagttggaaagatgcgaaatgaattagcccagaggccaggagtggggagatatgatttgtattaatattttttgagatatgatgttggtatgcaaccataataagcagcacattgaaaagttaattcagcagcagtaattctgagaagtaatgcaacttatttgtcactaaggaggactgcatagccaagtgatttctttatgcattttaaagtgtttttaaacccttgggtagctatagtcaatttttaaacatgtttcctcattaattttgaatttgtaaatgtacattgtacaggagtgttttaatcatctggggaggctgcttcacagatggctcttgtgtgacctaaaatttcaatgattgtaatgaatcagaatggatgatggtaaacttgcttggagatttgctgattgtcaacagttttacagttttgctactgttcttgaaagtttcgtgcttcttcaaaatgaaaggaaagcaattgtaatgggaccgtcaggaccaggagttgcctaaatgaaataatttcagtcagttccttactattctctgtggaattcttttcagtaaaatacaccaacagaatgattgatcatgttgaatctaacacatgtgtagagagtgagtcatcggctctccaggcctacacgtgacaggccatttcatgcctctctgtgatactatatgcagtcctaattaaaatatgagaaaatctaacaagaaatgctctagtgaattacttatgccaatgttctccttctgtggcaccagaagttgagaattgcctaggcaaagggtttatcaggtacataaagctttacctatcactgttaaagacttaacttggctgagtgcagtagctcacacgtataatctcaacactttgagaggctgtggcagaaggattgcttgagaccaggagttcgagaccagcctgggcaacatagtgagaccccatctctacaaagaataacaacaacagcaacaaaaatagccaggcatggttggcgcatggctgtggtcccagctatttgggaggctgaggatctcttgagcctaggaggtggaggctgcagtgagccatgatcgatcatgccactgcactccaccttgggcaacagagggagatcttgtctcaaaaaaaaaaaagattgaacttaaaatgcatctagaaaccagaattataatagacaaatccatttatgagacccctagttctgtttgtttgtgctagaatcatgtgtgtgtttcaccccaggctttaccgtgcaatctgcctgcagcacagtgcaggcaaaagaagatggtctgggacattagagtcacacatgttctcacttactagtgttacccacacaacaggtgggttcaatcgcttggcaggtaacagtccaatgacaatgaaggaggatttaacaagggggttttattacttgccacaggtaaggaggataccggggataggtcccaaagcaatgcctcccctaacaaaggtgaacacagggcttttattgggctggttaactgagtcgttgtatgtagaggtggcatataggcagcacaggcacagccactgatcgtgcctctacacacgtcaaatgtataggaaatggcaagtaggcttctccctgggtttggaggttagtatggtaatgagtggagtttgccaaagttcatctccaactcaggcatctctggatcccatcagtttggtttttcctgggctgagcttcttcctagagcttttttgaaacaagaactcaaggtgcaacgttacaagtggatacattttcacaataatgcatctccaaaacccagcaaccctgggttacactatctatgtgtatctgtgcataaattagcctttctgaattttggttttttggaacagaggatggttaactctgccaagtggagaggctgtggtggtgaagtagcacgtttaatcctggcacagaacacactccacaagtagtagctctttcctagtctcttactatcctcgttctctgtaagaggtggcccccagactgcacatttcaaggcctcgtgcattccaagaacctccacctttaatctctatgttctccgattaacaattcttaggaaattctggagcctgccattcgctggcaggtgcttgaaactccagattcctaatgctgctgaggctctccaggagggaactccaggagaggcgcctggcgtaagatgaggccaggatattcactgtcaggttatcccaggcattctagtaggagtctcagtactgaagtgggacacacaacgcttgtcctttgggggccctggcagggaaaagttacttctcattccctatttgagcaggtactggtgtaaaagctgtgctgagcatgacattgagcaccagcctagaagactcatcttcacctaaattatgggtcattactgttcatcttttctgaccattcatcactcccaacagtgccctgttgatagagacagaaggcagagaaactctaggcagacagggcaggtccctggtgaagtcccaccttccagccgtaaagcgtgaaacccatggcccaaagtgagaacttctatccctgtgtgcccactctctcctgattggttctttctgaataatgtcttttttaccaattgaatgttgccttttctcaaactacctatggctcaccctgctccccatcctgtgcctataaagaccgtagactcagtcagtagagagagaaacagcttgactcgagagagggaacttgatttcagggggatggttggccctaggaggagagatggctcttgatttcagggggatggttggccctaggaggagagatggcttaacttcagaaaagagccagacagagatggccggacatcagggaagattacctgcccatcctgtcgcctctcctgctcccctctctgctgatagccatttccatcacttaataaaattctctgcctcaccatccttcaagtgtctgggcaacctcattcttcttggatgccgaacagagctcaggactcacggagtgtggtgcccaacaaaggctgtcacactggcactttgcccttgctggcagagggccgtcaccccaccggatgaggcaagggccccactgagctgataacacactactgtccatggacggcagagctaatagagcactgtaacacaccctctggggttttgggggttgcagacaccccacctgggcaccaccatggggcctgcatggagcctgctcctgctggagtccaaagctgctggccggattctgaactcgcttgctcatgtgatccctcccacaagaggttgagtggggcgggcagagtaagttggcacccctgtcacaagtctgatgaaggggtcgagaaaaactcctgcactgctttcacctagcgggcccagtgcctttcctgggccctgagccagtcctgatagagagaagaaaaaggacatttaataaggtttatgcttcttggttgaatgtgttactcttcccagagagttttcattttaatgagaatcaagcagagtaaaaaaccaaaggaatgaaacatctagtagtggaatatcaaataagaggagcccagaggggagcagccttgggtagcctaggctttggggccctgaggaaggtggtctccactgacctacctaagaaggctgtcacattggaaacagttttgttccttatgcagcaagtatgtaggtataggctagtgtttaaatatcaggacccacattaaccagaacacccagtaaaatcactatgctgccccctaccctattcctttggcagatggtctcaagagaagtccactctcagtgacagcaatggcaaatagctatgctgccacccctgtctcccatgcctggcacatgccactcctccatcccagttgactttcctgctgagcccatgctcattcaggatccttctcaaccctgtgtcccaggcaaatattattgtttcatcagattttactaatgcgataaaatcgatctgccttcctcaggctatgatttgcacattctagataaagtaggctgcacaatcaatgttgtctcccattttgctgattttactcactttagagatggcaagcagctttcccaaggtcatccggtggtttatggcagaaagacacctcaaaatgggatctgacctcttcaaaccctacacttgtctactccgtgtagctgtttccttgaaatcacaagtgcttcttgcttttttgtttacacactttatgagatgttaacacaaaggtactgctcccaagggtgtagattttcactaaacaaaacacacaccagttatttgcttagcaaatggcatgggcttaggattcatgtgtgaccccataaaaattaggaattatctgacatacctcatcacatacttccctttgaaaagctgcctccaccgactgggaccctggtcattagaataaacatactggttttgatgatgataaagtccaagtgagccccagttttaggattgttccatgaacaaagtgttttatttgcactgtcaaattgaaataagctataagaacaaacttattgggctgggcatggtggctcacgcctgtaatcccagcactttgggaggctgaggccggtggatcacgaggttgggagactgaggccatcctggccaacatggtgaaaccccatgtctactaaaatacaaaaaacattagccaggcatggtggagagcgcctgtagtcccagctacttgggaggctgaggcaggagaattgcttgaacctgggaggtggaggttgcagtgagcggagattgcaccactgcactccagcctgggtgacagagtgagactctgtctcaagaaacaaacaaacaaacaaacaaacaaacaagaacttattgactcccaggatagcctctgtcatacagagcctctggtctccagaccagcactacattgtcactggggagtatactttcaaaatatttggtattctgaattctaggaaatggccgagtacagcataatgttctctgcttctcaaaaaccttctgtttggcgtggaaacacatgctctgatctgtatgtcaagtttttctgtgtgtggctcttcaatcaaattacccaatatgggactattcatggggagctcttctgagaactgagttggaactcagaggctggccaactcccagggctctcctggctccccacccacggtgctcactaaatgctttttttacttcctccaccagttctcgtcatcttaaaatctaactcaagtcatggttgtctatgtgacttgttgactagtctaacctgtattaatccttttttaatctgaattaatacagtgtacattttgataagagctgctttttatggttgattgtgtgcgcactgcgttaccgtaggatcccattcacagtgttgtcactgaaaatttgtatagttatcactacatcattccagcatacaataggagagtgccttgaagaaggggtactttgttaatgcacacgacggtgccatattgaatagtgaaagagctacccaccagttccaactgcccagtcagaccctgggaattatcttgttcttctctacagggcacacaccttgaggtctagaggaaacaatcattgagtgggtatctattaggtttccagaaactgggctgggcaatatgttacctcccttcattctgttaataattataaagtttgagaattgtctctttattttagaggttaaaatgtaagtaattttttcagttatgtagctgatcatgacagagcattgatttgaactccaatcttcctcatttcaaagtccacattctttgcctcatatcccattagtccccagtatatatggcacagggatcatgcctctgtggattctcaataaatgctatgagaattaattagctaaagaagagtagcagagagcagttcatgggtcatcagggttttgtttatagcctgtagagtttagctgtcctttcctgtggtgtaggtgagagaaaaaatactgaagtggaccatgtggacccatagctacttggagcctcagcatcaggacttaccatccaatcttacatcttcagaatttccaggtcttcccctgtgtggaagtggcaccactgtagtagcatggaaggttgattggaacttggtggatattaactgaaacatcttagaaactctctggaacccagagatgaaactttggttgaaactcattagaggaggattgtattagtccattttcatgctgctgataaagacatacccaagactaggtaatttataaaggaaagaggtttaattgactcacagttcagcatggctggggaggcctcaggaaacttatgatcgtggtggaaggggaagcaaacatgtccttcttcacatggtggcaggaaggagaagtgctgagcaaatagggaaaagccctttataaaaccatcagatcttgtgagaactcactcattatcacaaaaacaggagcatgggggtaactgcccccatgattcaattacctcccaccggttccctcctgcaacatgtgggaattatgggtactacaattcaagatgagatttgagtggggacacagccaaaacatatcaaggatacttttaaaatcttctacattctgttttattattcagcatctcacatttaaaatgtttaggcaatatggttctgtgagcaagggtgcctgcctgggggctatgactacatgagaaattggtttgctgcaataaacagaggcctggatgtggcaggaaactcacattccaatgcaagccctgcacatgaccagctgtcctctctggccagtcacttcagctctccacatttacttatatatagaatgtggaaaataatctcttccctttacctatgaagggcttgatgttgaggtaaaatatttcttttcttttttgagacaggatctagcttctgttgcccaggctagagtgcagtgtggcaagattatggctcactgcagcctcaaactcctgggctcaagcaatcctcctgcctcagcctcccaagtagctgaaaccacaggcatgcaccaccacgctaggctaattgttttacgttttgtagagatggggtcacaatatgttgcccagactgatctcaagcaaccttcctgtcacagcctcccaaagtactaggattataggcatgagccactgtgtttagcctaaaaatatatttttacgtagaggtgttttgaagtttgctagtggcaaatgcttatcactatatggctaataataatatttagccattcattttggatatccaataagtattattaagatctatctttcacaggtactgttctaggcactgatgatacctagttgaaagagatgcaaatggtacctgttcttgaagaacttatatttgagtgagggtagatacaatataaaaatttagtaaactgtttataacaagaaataaatgtacaatatagtttcaaataataataaggatttaaagtaagacagggcgatgagataaagtaggggtggggcctcatctggctggctacctgttattgtactgccttggggcagagatttgtttttacatttttaaatggctaacatttaaaaaataaagatctcttgatatgtgaaattatattaaattgaaattttgatattcatacttaaatttttgttagaacacaaatactctcattcaatggcagaattatttgcaacagagatcataaaaaatatttactatttatattactatttgacctttcatagaaaaagatttactgattgctgtgatggactgtgatggggatataatttgtctaggttggtcagaaaaaggctttacaggtttccatcatcaccattattatcttcatcatcataattattattttatatcttctagatgagtaatctctgacaaactatttaagccatcattgtcacattcagaacagataaactttaaattcctgcttgattttgtgaccctttgaatgatgtatagtcaagtttctctctgttagaagttgttatatttgtttaagtatccccagcaaaattttcatccttcccagcttctctttgccacctacctgcatttttgcgcaccctattctgttgtcagatggtgtgtgccaacaaattgtattagtctaaagaaaacataattatgaaggtaaaactgatacaaaataaggtcatttgctgagccaaatataaattatatttggatcacctgttgtttgggattttctgcctcagtactccacccattagagagctaatcaggagccagctgtgactgtgactggagcagtatcttacctgtgagttgcgtaaaggctggctggtgcaatgattagccgatgccatctatcagccagtgctgtgtggctgtcatgccccagtgctgaggtgtgctttacagagatctgggagcctcttcaggcatatttctggggcgaggagtgtaccacattttacccaagaggaaagacaaggaaagtcagggaaatgtaggaagtaaatgaatttaagtgaaaatctggagatgtaggcttttgggttatacatataatttgatactgtgaaacattcagtggatcttcatgtgggaataactgtacatttaacttctaatgacagataaccagtggcaaaaaaagctatttttaaatgcgttaatcacaattgtattgacgtacattgaggacagagcagtacaggcgtacacaagttatttttattcagtaaacagttcttggtgtgcatatggatttgaattttcttttctataaattgcagatctgccatgagtctgtagtccatagattgggagtcattcttccggatcaggaatcagcaagctatagctagtgggccaaatctggcccaccacctgttttagtaaataaagttttattggaacacagccacgctcatttgtttacttattgtttatggctgcttttgcactgtaatggcagagttgagtagttgtgacagaaaccatctggcatgtaagccaaaaaacatgtattatctggccctttacagaaaaagtatgggacccttgcattcagttattgttttctcatggacaagagtgggtttttaaaaagatatttaaatccccgtgtatcataaatatgcaagtactatctggtaaggtggaagaaaatatgataaaaacattcatgggattctggaatattaattctggatattgtgtgcatttctggaataacaaagctaaagaatatttcattatttatacaggcaattcctttgcctctatggccacctatttattcaatctacttaaaagaattttgtttttcagggcaaactcttccagtgtttatgaccattttattatctgcatcatgaggtgtttctgggtgccccctttctgatgggcactgagagaagatctcagagcttaataatttgaacacagagaaaattccgtcgtctaaataatgtacattgttcttctatcctctgggtatatctgtctcttcctcctcagtcctcagagaagatgaaaaatatctggtaacttgtgttgcttgaaaactcagatataccctcttttatgcaataggaatcggttgggttcctgaatgggaaaactattgtgatttcaggatatcaaatccagagttttattcaaatacattaagaaaaaccctgggacataggattttgtaaagaaaatattcatttttaaaacatgaaaacacaggtatcaaatacataggttttgctagattttatttgcagatggtagattttctctgcttactctaagctttttacccaggatctgtgttccagcctcgtggccatacccactggccatatcctctgctcatctgacaccaaaagactttccatatttggagtagaaacagaaaaaataaagaagcagcaaatgttcacatgcagtgtccagttagaggagcacgctggctttctgagggaagagggcactcacatagaagttcaggagttggatagaagctacattgcactgggctcctatccccataatcagactttccacagaattgcattttctaacctaccttctcaaaggatggctgagatttttgggtagggccagataccactctgctgtgacttcagcttgacaaggtgtctgaagatatcctcacaaacggcctgatttttgctccatggtttccatcaaagatgtcagttcatatcttcatcttactccaagaaaccttgaagaggaaatgtgtatctgagctctgtagttgaccagtggacttccgagagcagactgacctcatgaggttggcattatcagaagctatgtttacacctcaggaaatggtctgcttcttccagagcagcctgcaaaagtgaaggcaataagcagctaatgtaatgagatcagcgtttgaggtagtactggatgtctgggggccagtgatacttacacacacgatttgttagataattcagcaagagctgaggcctgactgaggcttcatgctttgtgagctgccagttttagtactgtttctatttccatcaaggccttcccttgctgtgtgggccagccttcattggcctaagaatcattcattcattcactctgcaaatgagtacctgcatttgcaaggtgtgattctgtatgctgtgagactattttaacagacatggtatacacttatgataattggttgagagaatggaacctaaccctcgaagaagacgttatctacctgacacgtgaagaaatggaggtagacagtacactccatcttctgaagattgggctctcaaggagctgataattttaaaaagatctttaggaccattgtcttcattccctaaaggctggaatagaaaatatcaaaattaattgtgccagtaaaagcaagttgacaatcttaaagcatggtaacgagagagagagggggagacggggagaggctgttgctcatgaataacgtggtgtgcactaaagatttgggacagagggagggcatacatatagcttgtagtatgctgtgtcctgggtacggtgctatttcaagagtgaacagtatgtgcagagcacagccacgtggaagggcaaggttctgggaatggaaaatagttctagattattaaggagacatgaaaaaagatgagggcaattataacagttaaggaaggagttctgaaacctgttgaccagggtttaggtccttgcttcattgctgtgagatgtatttggacagttaacctctccgtgcctttgtttctctacccatatggactggaaataggatatcaatcagcccgaaatgggggctgtcacatattaagctatcgacacatatattagacaaattgtaaagaatgtcttatggtatagaatcaagtttaataaacttttttttttcccgtaaaggtcaggcagtaaatattgtgggctgtggttgtgggctacctatagtctctgttgcaattcctcagcaatatcattatagcacaaaagcagccacagccactacataaacaagtgggtatagctgtgttccaataaaacttaagtaacaaaaacaggttgtgggatggatttgacctgtgggctatagtttaccatgtgtttagaatatggactgtgttctggctgttacaggttcatgtgtgttacagggttgggtgtaggggactcattcatagtttttacattaatagcccctaaaaagctaaaaaaaaaaaaaaaaaagaacgacacaattagattttagaatttagaaagatagcactcttttaacagagtggtgcagttaccaaagtgtgcaattttctgtatatgtttgtgtgcatatgcatatgcgtgggaatttgtgtttgtacatgtgtatgtgtgtgttagcattggcagaaatgagatgaatctacaagctgctgacatggtctagagattatgagaacttgggataagatagggcattagaaatagagaagagagcacccttgggtgacaatgtgtttagatattttaggatgacagccaggtttctactttggtaattgagataacagctactggaagaacaggctcagggaagatgctacattcatgtgaggagagggtgagtttgatcagcccatcagataagttttcttgtgggcatattgagttcagaagagacaaggtgtgtagatacaactgtggaaagcactaatacatgcctaatccaatcccagagaagggaaaatagaagaaaatagtgtgtgtgtgtgtgtgtgtgtgtgtgtgtgtgtctatgcaaaggtatttaggctaacttattcatgtgttaacataaggctagacatacatggacacacttggaagttctgggaattgggagaaagaagatttaaaattttcttctcaaaatactgctcaaattcaagagtacctttccactatgaaggtgtcagttgtcgagatactcacaagctatttaattcctaatctgtaagagtctgtagaagctaaagaaatatctttatgttggacctttaggcaagacagaaggaccagtttttagtgaataagtggagagaagaaaatagaaaacaatgcatataacactcagactgtagttctttactctaatggaggatttccataaaaatctttttatttgacctcaagggcacatagtttacataaattccgtatgtatgtggatgatctcactgactcacctacctagagtttccctggctttttttgagttctcatttaggttttttaaaattgtattttattcagcatagatggttcctgtgtgagtgtgtgtgtgtgtgtgtgtgtgtgtgtgtgtacaatgtgtccccagcaactgattccaaaaatgacttgctgaaatgcacaattctggctgagctggcactgatcttttgatgtgggtggatttctgctgatttgtggaaagcttcatgccccaaccccctgtgaagtcacagctggcttttccaggccagttggctggaggtaagagtaccatctggggcattgaaaagcagtgagactaactggtctactggggggattgaataggcaatgtggatcatgctggtggcagcctccagtgagtgcacttcactctaccaaaatgttcaaataagacctcagcttacaacacatagtttgggtgttatattagtattagtgtttgactattatcttgcctctgaccctggaaagaagactgattgtattaccatcattttatatatatagtctaatcgtaacaataaccttatgaggtgactactgtttttcttcatccttattttagagacagggtgacatacgggaaggttgttacatagtctgtacatggaaagagaggatactggcacagttgctaagagcccaagttcttaaccaagacaggctcctccctctctctcaacagttacctatcacccaaatgtggtttgtttttttatctgtgttccttgttttgaaaaatacattgtgttaaaaattggtattcttttgatgaccaaatctcaaatttaggactttccttttacctgaacattttttgtaaaacatctactctcttgaagttgtatcagtctattcaaaatagacgtggggcatgaatagtcatataggaagaccaaagccttctagggcaagtcgtcattggaatggaggaagtccaggctttccattttccttgaaagaaagttttcctttccaaatagctctttccaaactctgcctttccaaatagcagaaatcagaaactttatgaatcagccttgtatttatgcttccttaacttccatgaaggcatgatttgtttagtttaataaggctttgattgcaggtatcagcacacaaacgttgactgaaactgggtttcttttggtaaaatgcaagctgtgtgaaattcatggaaaatgcaattacgttctaatttactcagtgtcactggctttaattaaagtagatcatatttctatgaagccaattcatgatcctctttaacaaaggaagtagaaaacataaggaaatttgctatttttcctttgaatattaacacagagctggttactttttggctacttttttgagaagtagcaggccacaggtcggcatccccaggcagaaaggcctgtaggggcccagccgaggcagcttgtctgctgcagaagagcctatccaggcctgatgtgagtgcactgggaagacatctctattcttagcctttactccgattcttcaccaccatccatctcacctatctcttctgtcttgtattgtctacttctcagggtatatcaaaggtaaaaactgagttaaatgtggatgcaatacgctaccctctttttaatcagattagaggtgttaggatggaagcaatcaaatactaaccaaccagaagcccgaaagtgggcagaaccacggttgttttagcaaagtcttcaaagaccctgactttttctaacctcagctcataggcttgatctttaggtttggcttgtcatggtggcaagatggctgttgcggttgcaggcatcttatagaggccaacaatatttgataaggagaagtgtcttctgccatttatctatcagacagatatcagatttctcagatttccctgactctctccctgacatatttcattagctagattgggtcaccagactatgacatgacaggaagaaatgcagagggacagggattggggagacatagctggcaagttattcttgcaaagaaagcacctatgggaggaatatgcaaggactagataatggttgttggataaaccaatatctgtgtctgtcataccactaatgatgtccatcattagttttgatatgttcatgtaggtgtgaaactattaggtaaatgaacttataagtcaagatcagcctcattgactttgaaaacatatatgtcagctggcatttataaataaaggcataggaagttcatgcaagataattgtatttacttctatcgaggcttcctgaaaactttatagtttctgaatcctcaatgtgaaatgattcagaaaaatttttaaaataattggagacaggtagtcatctataactacatttttatatgctgtaaggggaggagagattaaaaagttttggtcatgggaatactatgatgacacttcttaatgtgatctccagtggactatgtaagacaatgaatttaaagtgcaacaatttatgctaaacaaggttaaaatgtggcaaagatggactaggttttaatgtgctataaggaaattaaaagcctctggcaatctataaacaatagcctttggttttgactgaagtgcccattacccacaaaaggtttggtcagtcactgtgctgataacacaatgcgtaattactaataggctctgcattgctgaggaggaactttttaaattttcctctctttcttgaactagatcgaagttcctcagtgctttttttaacaatcattttaatttgtctgatagtttttacttcctttcacaactaaattgactgatgacagtcaatagactttcattcattaaaagtaatagcttactatatttgctgagctaaatatctgcacataatttccagtgtaaattttgtgaatatatgggtgcaattttactgttttatttctgttttaagtatattaccttctgaagagtggtatttggattttgctgacatgccatggaaaactccttcgggataccctgtggtctaacaagaatctggaaaaatagaaaccgaaggaaaccgagtgctcattggatcctcctttttccttttaggatggatgaacttgagactaaggaaggatttttgttccaaggttaagagttgcatggggatcaggtggctgcctttaactggctctttctaatgccttccttgcttggcatagtgctgtagacacggcagtcacccagtgtttgctatttgggtgaatgaattatttaaggacatttgtattttcttttactcagctgctaggaagttatggcaatggtgtggggatcatattggccacaaatcatgatggcaagtaggacaggatatcagggctccggatcatatttttctgaggtgctcttaagggcgtatacctagactcatctatttaatctgattgcagttggttggtgggatggttggttcagagtaggaaccactgacatttggtttaattgccttggaacagttatgtcccatgtgcctcaatgatggccatcttggataaaactaataaataagtggagtgtgtggtgtaaatcgaatgctttctctagattttttccacatggtacaacatggctaatgaaggcatctactctctggggcatgtgaaaatccaaaaggtatggctttgcgtttacaaaaaatgctgatggaagccatttcccaattctgattttgtcttaaggctagactgcttttaaagctactattagcaaataattgtcccttaagtgaaaatagcaggctctcaaaggcagaccattgaataccacagagtcaacagattagattataatttagattagattttagatttttacaacgtagatatagattagaatttcagctctaccacttattagttatatcaccttgaacaagtcacatatgttctctgtacttcaatttattaatatgtataatgggaataatcattattattacttttatcctctccagctggtttttgaagagtaaaacaatgcatatgaaagttttgaaaacagtgtggtatcatgtaaatctaagagattagtattaacgtctatcagaaccatgcagcaataaaaaataacaattatattgggaggcagttttccatagtaagtgccttagaatcattaaaagtattgaaaaggacctaagaaaacctaaaatggcaatctcgtattgaagatgaaggagctgatgttcagtggagtttcgtgattctcccagggtttgtgggaaatggcaaaagtaaaaatcagtgccttcaactgttcatgacatattccttcttgatcacaaggtttcattaatcagagagaacctgtagggaaggtgaatggtgtaattccaaagtaaaatctaacccggatgaatcaaccccatagaagattactgaatatccattatatggtaaacctggtccgatgggaaataaaaacgcttggctgctgacctagaggagccgttcatctgtttggaagatcagacatgccccttggaaagatgagggatgacaagaatgaagtgtgaacctcacatgaagtactgttgggtggcgaggctgtgggtgtaacagggaaattgccacagcctagcactcagtttcctcggcttggtcacaaatgcagaatcttggaaaatgacttcattccctggtttgactgctaagaatcactcaggacgcttgataaattcacagatggctcacctttttttctgtaaggaattacgtggctctgggttggagcttggaatctctctctttctctctctacttctctctctctctcccccgtcctgtttctccctatttctttgtctctgcctctttctctatctctcttccctctctctgtttccctctctttctttgtctctgtctctctctcaatctctcttccctctctctgtttccccctctttctctgtctctgtctctttctctctctccccccttccttttttgctctctctcccagccagccccctttctctctttctctctttgcccaacataatttctactttcaagcaagattaggaaacacttctttaactgatatcatcagactgaatctactttttttcttgctgaaaattggagggttgaagtagaccagcagtcattttcaagctgtttccagagttgatctgttttacgtattggttttccacatatgcattactctgtggaaattgacccaagattttgatccatgcttggcagagggctgtggatacagtccacactcaataaatgtctgctatttaagttagtgaattatagataattatgtagttatagtataggtatcgccataggtacctatgcaaaagtgtgtgtgtgcgcatgtgcatatgtgtgtgaatagataatacagtccctgccgttgggtggcttacatgacactggagagtgaagacatatgctgtgagtggttggcagaggcaaggagaatatttctgttagtttcctgagcagactgcagagtcagcttatcacctcctggaaccttccctcatccaggaaggcaaagccctgcactacgcctacaaaaaccaaagcaaaactcatcagcttcaaatggaaccgtctcacttctgctgtctctgagggtgatatggtgtgggtcccaccacctcctttcctctggggataagttcatccagtctccggtcatctttcacttgtgaaaagaacagggagaggcttaattcatgactgctgcctactttctgcttattcactggctgatttcattaagccctttagaagccagtcgttgggctttgcctcattcagctcccaagcatttcgttcttttcttattttctgcagtttatggagaaaccgggtcgtccttacacccttcctgaaagaaaacagcttaatgaagcagacaagtgctaaacaatgcagaaacacatattacaggtttaagaatgaccagaatgggctgcagaagtgatgaaagggcaaggaagaacatcttcagcttgtccttaaagaggatggagaacatttgaattgttagtggtgcagaaaaaaaaaaaaaaatactccaggcctgatgtgaaagaaggcctggagacattaataacacatggtattcaacaggaattttccagaaactggtctaggcatcactgggctaaaatattacttctgaaggtctgcagaatgctagtgaacaatcgtttctcaaatctgactttcctatttcttgttcagtatgtattcccttgccctgctttccttcctatttttgtgacaaatgtacttataataggtcttaaaaagggctttgaagactgacagtgaaacaagcacttgtgaaataaccacccagagaaggcaaaatctgatttcactaggatgttactggattcctcttccattagatgttttcacaggtcctatggcaatatggggcttgtgatggtggctaccttatccgtctctctagtttagtaaagaaattgtctgagggaaaacagggtacagattcttaggactggccacattcatttgcatttgggccctgaccaagcccccagcacagcccagcaggggctgtgatcctcctgtacactgtgagatagatgcttttgaaataggctagaaaggcaaggaagcagggttgctgctgttcacaagctcccctctcttctgcctctcacatccatccctatagttttggcttagaaccagccacactgtgagactaatccttaacttcagcaggaaacgtcactgagcgaagtcttggtggcatgtcatgttcctttttgagctttatgccccagatctatgtccagacactgtttccatatttaccgatgtctgccctgcatttctgattgaagttatgcagagtatctaggcccaggtgccatctttgactcagaaccatacccttgggactggattaagtgcttacacaccttgcctcattagatcctcatcataatctaagatactttttgtccccattttaccagtgaagacattgaataacagagtccttaaaagaatttcccaaatgcatgaatcaagaaagtagcggtccggggttcgcaaccaaatataacttcatattctttataaaatatgctctctattagaatatatcctcatttttttccaaacatagtttactaaatattttctcgtatatagtacaaaggttgaagttgtgtgaagacattggtatttgcttccctacccaaagttcttgagaaccaaattctgttgcatcaaagagacctggtcaaattgtgaatatttaaatccattacctaaatgtacagcgttgccatgcattgcttttcccaggggttgagcgaggttacccctccccttcctcttcctctgaataaatatgcaatctttgagagtcctcaaagacccctgtcaagctttggacatcagcaggagagttttagaaacatgtcgaggtcactgatagctttgcggaggaagttgagcaggagaatgaatagacttggaaggcacacggaggagctgagagtggagcaggggccaaggcagaggggaagatttagcatggcctattcaagggacaatcggtgctgatttgccagcttggaagagaacaccagtaccattttagacatttaacaaaatgtttttggaaagaacatcagtgaaccagtttggatgagaaccaaatctaggttttgtctgaaacgattgaagtacagcaaatctggggcatcaaaatcttagaattttatatctggtgtcatttggcccaaatgacattttacagcagaggaagatgtgttaagtgtgaagttagttactctgtgtcattcgaggtgacaagtctgggctcaatcacaggctccggctctcaagtccattgctggctccactgcaccgtggagccttccccaaatgggatctgagcaacactgatggtgtcctcagtctggggacctacgaagattacagtgacaaggactatctctgatgcagagatttcaatgggactgtagacagctcttggatatggatagattagttttaccagtcatttggccgcccacatggatgtcagtaactcatggagctgatcattccatctcatgcaaggaaggcatctctaaggcacacatgcaacctctgccatcctgtgcatagagcagatgtcactatctagataccacagcctcctcctactggtcccaggtggcaagagaatggttctcatcagactccttcatgaagctggctttaatcaattggagttggcatgtgagatgaaacccatttgccatttctgctctagtgcctggtgctgaaattagagatatctttctaattttcttcaggccaattcttaatgctttgtggcaccatccctaatctctgcagcctgctacaatggaaatttttgtgtaaggcaaaatgatatccacacacaggccaataataccccacatgatagaaagcccagggaggcaaaggctattgtacttttctgcagaatgggaataccgaagcacctggttcacttttgtaaagaataaaagcaataatgattggaaagtgcttagtactataactcgcactcagccatctatctctataaatgttagctcctccctctcttgcctgatataaacatttccccatactcctatatagatttttgccctgtgtagagttgtgctgtttctgctcctgcttctttgcctacatttttacctttcttctgtgtttttcccctcttttttctgaaaagaaaaatgaggcaaggtattataaaatttgcaaaactcaaatctaaagcatggtgtctggttaatagtgggagctcagcatcacaagtgttagattgggtggatggttatagacatagagggtttaaaatgactgttttaaagcactgccattgcatgaccccctcctctccctaatgatcctccccatagagtgaaagttaaggggaatcctcaaggggagatcttctctggcccatcttctgcttctctttgctctaaatctcttacctccaactcctaccattctctctctctctctctctctgtcttgatccctctcccctaatccctctcccaatcccctttatttcttcttaggttactttcttctttattctctcctccatccattctgctttgccctttctttccctccctccctccctccctccctccctccctccctccctccctccctcccttccttccttccttccttccttccttccttcctcactccctccctttcgtctttccttccttcctccccagcttcccttgtctaccaactcatggcctacccttcttttcccgtttccctcagggcttgattaaatcatggctgtctgatttaatctcaactacccttgttctgttctttctcttgccttccagcagtcacatctaaacctgaagagaaacttggagaaagagaatggactggatgaagcagctaaacaagcttaagaaaaccacatggggaggaggaggtgtaggaatgggaactctgttctgtgtttccttcagctcttctcctttaaatacggctcttagtcacaagtgtgggttgttgctatgattcatcagtgttgttttctcagacaaaagacaggaaacatttttggagaaaactgaaatgaggactaggttgcattctttgacaaggctgaccttgcaagttagtcaggtaaacagatgtttgcattgtgattagggagccctgaacagaagtgtctgtccccaaatcaactttatagccagtctttatcataatgatttactattttagatcaaaaggtttttttttgttttgtataggacctgcaaacaatagattgttaaattttagctgcatatatgtttgttattccctatacaccttagcttgctgtccctgtagagagaggaactccagctatgccttttggggcagaagaatatgctatgaagaatagatagggaaactgacatgaaagtggttaacactatggactgactactagtttcataatgatcagcctttccctccaaccatctaacatgacagatgtggaaatctgtatggccaggtgtgcatgtaaaagctaggacatagccaagtgtatggacacgcacagttatttggaagagattcaacccaggttgtttaaatatttgactccataccctagccccttcttcctgcccctgaagaaggagaatagaaaatgaagtagagatctgtgactgcaaattagcagttaggatggttgtcttgctggagtgatttgaaaaggagattgcacctgagggagacagagtcaagacactaatgccaaatgtgtcattttgaccatttactgaagtgcaactctctggaactctgggctatcaattagtgtaggatttgcagggatcattagcctaaagagggacatttttacttggagtacagggggcagctattcttagctcagtatgatctctgtgggagagttcttactggtcacaaatctctaaagtcattgatttcctaaaatatcaattatattcactgacatgttttgcaaacttttggacaggcgattgtcatggctcactctgctcagtggttttgataaaatatgctgatgaaagtcatcagattcttctcgggggcaatgatcaagaagataggtttttggggaaaagaagaaatttaggaagctacaggaaaagcaaatcatgcctcagggtatcagccactggcagaagttgtgattgggtttgaaatgtttttgacaatgcaaaggccagagccagtcaggctgtgaaaaccgaagcctggtgctctaatggtggaaaggaatttaactgcaattactccaaatgtgattttgctcatttgagtgatcagtgttagagaatcctcagcttggtactatgagaggcacttaacctctaatgggagtcagcacagctgagggctttgggaggattgacacagccagcctctgtgagctcagtctagtccctatcctctctgggccacagctttccaaagaacaacatcagaataataacatctgcccctctgccacgcatgggtgttttcaaagcaacgtaagttaaaagacggataaataatgggccaatgtaaagcacagtttgtataactttagccaactctaaacaccagaaatttacccaaaaaacagtgccaattaaacccacaaagatcagaagtccaagtagcagcgacaatgtgccaagtacaaatggtttcctgtttatatttttcttctctataagctcagggagtcctgagattgtgtcttttgatattttatctgttccatctatatgaccccggaaacgattccaaaattactgatccatgggtagatcagtcttagaccaggtttgggagtcgtcaccaggccattttcaagtggaaaaggagaatgtcttaaagtccattcacacactaccttaacattatgctttgctcctggatattgcctacaaatggaaatagatgtgctagcctcttctgtaatgcaatccatggatggggatataagacagcataaataacatcatatgatctacacttcaaagaaagtatgaagcttcttttaggtattgtcagttcatgccaagatatgattctaagatggaattaaatgtacaagagatcttgggaaacacacctgtaaatgatgatgggagtagacatgatgtttgggagagcctcagaccatgatgcaagcctaacatctgtggatggacagaaagaaagaaggattatataggaagggccttgaattgcagtcctggctgtctcagtcaggctgatgggaaggccctgaacaaagtctattacaggggtcccgcattaagcaggaattaccactgtagcctccatgctcagtagcctctgtaaataccatggcagcttcaaaggagtagcgagttaaagctgtcagtcaactgctcttcacagcaggttgtcttgcagggagagatgagtaagacaccttcatggtcatcacgggtgttactgatacctcctatcctgcacttctcagccctatgttggaatccctagacacctctagggccaggtggctttgctgtatggccaggctatctactgttggttcagttacccaattaactcagcagtcaccaatattctaggcaccaatcaccactgttagtgaatttttgctacatgtcagatgccaagctaactggtacgcatataagatcatctcatccttaactacaactctataatggaactcctgtgaaaatccccatttgacagatgaaactcacagcataaatcacttgttctgatccacataactggtaagtgatggaaattcctttggaacctggatcggcctggtcacctggctactctactgtgcttctgcccatctagtgcaagtctgcaagtctcccaagtaatctgggagtgcaagtaacctcagaactatgctaagtcctggggattttgtgattatgatgagagtcagaactgaaatctaaataaaaaattatgatacaggtcagtgtgggaattgctcagagcactgagataaactggagctcagtcttgcaggatgagaggggattactaacctgatcaaaagaagaagagaaattgaggcagaccaaagtgcatttgccaaatcacggtggtgccaaagagaacctataaccctttcacctgctcacaatttttccattcagtgttctagtcaagctctgctgttttaagataagatctacttgcctggaaagcttatgtttattaaagcagccatttaaaaccattatgttacatagagatcagttacaaggtgtagttcaagtaattactacaaataattaaagccctagaatttctgcaggctttactgtttctctaaattggagcacattcaaggtaattcccattatagagcagtctgtcacgtattccaactatttttcatgagtgggagaaaaagagatagagttacaactattgctccaggagctgcagttgggagtatgtctcccactctcctacatgaatatcatctgccatttgtatatcagtgagagaaaatgtttgaaaatcactttagtaaaaagatgcaagttatgtatacataaaacatacctgtcaaagtagagaaagattaaacgacagggaacacagtcaacctgcgatggtggttgtatctgaatgcgggaggtggctagaacctagaatgagaatagagaatactttaactcaaaacaggtatataagtaaacagcaaatctgctttgaagactgtgtttgttatttcttgtactcttttttttttaattttctgatataaagttgctttttaaaatgttaatggaaaaagaaaaaaaagaattcatgaagcccagataaataggggatggaaatagaaatgaggcttacaacaagagtaggccaactctaagaaaatatattaattcgccttgtgattaaaaagaataatactgaatctatatatgagagaaaatgtcacagctataccaaaaaaaaaaagagaagaattgataaaatccaaaaaagcatatggtttagttcattttattgtaccaatgtcaatttcctgtttttttgtttgtttgtttgtttgttttgagacagagtctgtctctgtcgcccaggttggagtgcagtggcgtaatctccactcactgtaacctccacacccctgggttcaagcaattctcattcctcagcctccagagtagccaggactattggcgtgcaccaccacacctggctaatttttgtatatttagtagacacgagatttcactgtgttagccaggctggtctcgaactcctggcctcaagtgatctgcccgccttggcctcccaaagtgctgggattacaggcataagccactgtactatggtcatgtaagacattatcattgaggaaagctgggtggaaacatacacagaaactcactgtactattgtaacaacttataggtctcctactatttcaaaattaaaagtttataaaatggtaatgacggtataaaattctatctatttctaagagatttttgttcttagaggggatttttatcatcactgcactagaacctagaatgaggatagaaaatttactaaagagcatagctctctaatagtgacaaatcaggtagggggtagaatcttccaagacagcccacagattccatggctctgatttttttccacccaccccaaattctaagcctcaccatgtgttcaattattaaacttgtacatacattctctcacatgttcttaaatcctcaagagcagtccttctaacaggtgtcttgtgtaggttattaaaaactatcagccgggcacggtggctcatgcctgtaatcccagcactttgggagcctgaggcaggtggatctcctgaagacaggagttcgagaccagcctggctaacatggtgaaaccccatctctactaaaaatacaaaaattagccagacgtggtggcaggcgcctgtaatcctagctactcgggaggctgaggcaggagaatcacttgaacctgggaggtggaggttgcagtgagccgagatcttgccatcgtactccagcctgggtgacaagagtgaaactctgtctcaaaaaacatgtatatataaatatatcttgtgcagtttaattttctgcttggatgatatgcctgctattgtgatgtttgtggaagtgaagacgtcttagcacgtactgttagctagagcactttggaggagaagagtagacacattgctactgaaagcttcatgctgccagccttacatgagaaccttgggctgtccttgcatgcaggtgggagagagggctgtctcataagcaggacttcaaggagtcgtagagacaagactggtctccatctgtttcaaagtttctttcatgcatcttccttccagatatgctctagttaaaatataaatgtatcacaggagagagacacattaatttctctccataaaatccgagtacgtgtttatgatatactatccaagtgcaaagtctagaagcaatataattccctcctaggatgggtggtgtaagggctttatcattgttactacctttgaattgattatttatttctatttaaagtaacaagttactcttggcagcccaaatactcagcagtgaactggaattggagaatgggggtgagagtcaagagcagaacccctataaatgcaggcattgatgtgagtaaaactaaaattagcagaatgttaataattgttgaggttgagtcacaggtacatggggacacattgttattctctctattttgtttatgtatatttgacatgttctatagaaaaaaatttaaaaagaaaaaataagtgattttgtattccaatgtattgtcaggagattattagatgttataataattttcaaaagaaggtaaaatcatgactcatatggatataaaaatgaacaccttgttatggattgaactgtgtgcccctaaaagatatgttgaagcctgaactcccagtacctgagaatgtgaccatgtttggaaatagtgtctttgcaggtttaatcaagttaagatgaggtcattagatgggacctaatttaatatggctgatgcccttataagaagagggaattttggacacagacatacaaggaggacgccatgtgaagacacagttggaaaagcagggaagagatggccttgtgtataaggaggcagagactggagttatgctgccacaagccaaggaacaactggggctacctgagctggaagaggcgaggaaggattctcccctagagggttctgagggagcgtggacctgccaacaacttggtttcagatttctagtctccagaactatgcagtaataaatttctgttgttttaagccacccagtttgtggcactttgttacgtcagccctgtgaaacaaacaaacaaacaaacaaaaaacaagttaaatattttatttaactcataatatggaaataggtgaggtgttacaaccaattcaaaaaagaagtgaaaaataagcccaaatgtatatagagtaaaggaatgttgaaatgaatgtgcaaatggaagcaaaactagattctcctacaatgggacagaaaagtcaattgaacctctactggacagaacataatttgcatgtgtatagaaaaaaattgtgcattgttctcagttcacctacaatttacagagtcgcaaaatagctcctgttgcatcagaatcagataaccttgacaggtgttctttaaactacgggttgttttctactgaactacataattttctctatatgactaagcaaaacaattttaaagccttcaatacaaatgctcattatagaaaaagaagaagaaatgaaaaagaatgaaaaattagatttaagacagactatatgtactgaattgtgatagttgagaaagttaatcaactctgtgacccctgttcctcattagtaatatgggaataatactattagtgcctgtctattaggtcatggtgagggttaaatgagataatgcactcagagtacgtgacaatgactggctcaaggtgttcaataaataattgccattattgctattattattttacagattgttgggaaaattaacccagagaatcaatagaagtgttgtatattatcaagtattcttcaactctagcttcacccaacaatcattactaacttgaatacaggacttgttttaagatgagagtaggctgaaaaggttgcaagctagagtaggatagtgtctgagaaacacagagcaagaaggaggcctaagaatgaagggagcaaataagagtaagaagaggggcatggagggaggaggcagggatgagacaaatggaaccaaggccaattgatggttgctgtgcaactacgctaagtgctgaccctcccccaaaccctttggttggtaaatgatcaccataatggatatgcaacccgctaatgacccagcttgtaaaccttccaggggggtttgcagaaaacccgttaataaacttcaacttcatccatgtgaccctgagaccccacttctgagggcagacagaagaggaagtgggtattattcagatgcacagggcaaatggaattaaggcacactgatgactgggtgcctgcgccatgccattcatgaggccagctttgtctcttcagcatctcactcaaaagagcacttctgccaaaaagccaccacccctgttctgcctttccggttgtgcttcaaagccgttattgtgtcacttgctctgggcttgaaattgttccttagatttcttccccgaaagagtttacagacattgtacaaagaaattaattaagtagattttccatttgcacaattttaatgaataaatgatgttcctatttgtttatctgctttctaattataacacaattcaaaacatcttggttttctgcattccgacaatgttattgttatggtggtgttattgctgttctctcagtgcaggtaatattattttttttagatagatgccaggtgcagtattccatatttattaaaatgtgatctgcatatttttctcttttcatgtactgcttatctgtacaagagcagaaagttaaatataatgctctgcattaaagagcctgaaaagagtttcacagacagtctgaggatttgtggtctggtgtggggattaggcttgggtgatgcagttcagggccaacagagagagacttgggctaggggccaaccagcaggacctaactttactgctcctagcagccaacaggccatgaactctggcaggaaggcctgacaaatggagttttcccaaggagacagatgtcagcggctcaaaagccagcaggcctgaaactcatggggagcaatctagagacaaaggaaggagggctctggacaggagatacagcctcttccttctttgtcgtagagttttgaggtgggtagaccagaaatcataagtgtttgttacagacagaattcagaggtctgtagaggaatcctgccttactgaggttgggcagatgtcccacgtctcttttctgccctctcagggtgcagggaagcatcattgtacacttttgcccttgactggaggagagttgtctgtaaatctgtcctgacctcagataggcacttgagaaccatccagtttaatgactgattgtgggccccctatgatgtgtcattcacagagctaagtgctgggaagacagtcctgttcttcaggaatttacagtctagactccagaaactgcattgggagacctctgtaaatatgagttgcttggctccctgaaagagttatatccttggcctgccttgaggtcaaatgctgtggatactgctcacagtggcttgaaattgcactccttttctccttgtgcactccttataaccccaggggtaggaggatggtggtataaaacatactcactgtccatgcttgctaacccatggtaaaaggcagtgtggtatagaggaaggaggattttgaagtagagcgatctggaatcccaaatatttcctgccttagtgtgagatactaagtaggtaaacttaatctcctgggcttatgtatcctactgtgcacaatgacaacgtgattcttggtttttgtatagtagttgcagcatttagatgaggtaatagttgtgaagttcctgagaagtgcctggacgttaataaatgactgttcttgatgcataatgactgttcttgatgcataggcctgcggaggaggcaagagcattgtatcattgtccaggatctgggaaactttgccaaaacctggctctgtgacttggtcaaagtactcaacctctcagccttagcatctgatttgtaaaatgaggatttggattagaagacctttggcaggaaggtcttgtgatttattgattgctatagtcaaccattgccaatgctaagtttgttggctttcttctatgaatagtcaatgtaccctgcttggactcttccttcttgtggtttccaaaacttgacctctttcttatgcagtttcctcccagtgagcaccctagtcatcctttatcctcacaactatagttcttttgtgttgcgttctgagcttgtgccttacttctcagggattttgctactgtggacactttcatcttttgtatgttatttcctgttcctttctttggtgactttctttttgtctgtactctttggcctcttgcaaaaagcagggccattgatctttatacccttcttattttattttcgctgagtctgttgattaaattgtacattggccacatactatgtttattaatgaagccaccatttaagaggtaataaagtctagtgtaattggctttattgcctctgcccaacctctttactggacagaaggtcagtcaaatggatagacacatgtttatctctttacaatagcagcacacaactgctgctgcatgaaggtggcctcttcattgcctccctccgtacaacatgtttatgttatctttatgtgaaaagatcttctttcctgatcagccatcagtgatgtgctccaagcacaggaagtgcctgtggtacccaggaattgcaacagctgtcagaaataaaagatatgtctcttgttcctgagaagtttatagtttactgagggagaccacacagcacacagggagttacatataatctgggctgttatcttataaggcagaatacagatattttgagaaacctaccacagtccaaggtggtaaaggagggtttatttcactctacactgagcctaattgagggataggagtttggggctgctaggaaggaagttataggcaattgaatttggctcagtaaaaggatgaactataaaactgtcagagttgctcaaagacataagaagctgtttcatgaagtggtgagttccctgtcaaaggtggtaataaaatacctgatgggaacattttgataggagatacgaactaacagtgaattagcaaggcaatttaaaaaatctccttgaattcctgggagtctgagacttaagactccctggactagggaggtaatgggaaagttctttgaagaaatgggactttgaggtcccgttaactaatgaaaggctagttaagtggaaagcactggaaaggtgctctcaggcaatgggatagaataagttaggagcttggacattggctgatactcagacgtaggaccatgcacataggaatccatgggatgggttttagaacagctggatctcctgccttttttttttttctaagttccttagccattcagataaactagggcatttctattgggacttctgtgtatttttggacacttgatcattccattgttgggattttaaacaacaaagtattgtgaatagagtgtcttgggctgcagtttctcaaactgttttgctgggggacacatgccccaccccagcatggcttcataagatggaagaattagctgttagagctacaggtcattctggtggcatatggacaagttcaaactcagttttgtgtcaattttacaaaggagaagattaggtgtggaaaataaagaaaaattgatatggaattccacagagcatcctggaagtatgacaaaccttcaatcctttggactctattaaatccataaatatcttgtatagcagaagagggaataaacaatcaattcaccccagtgtcaacagagtggtcttagaaaaacctggatctgatatggctcctttgcttaaaatcctttagtgttgcctgatcacctctaataagaacatcaaccttcttggggtggaaaaaaaggcagttaatgattgacagcatcaactttacagtcccattgtttggggataaatgttgatcttaggctagttacatagcctatctatgccttggtttctccatctgctaaatggagagtattgtaatagcacctgcctcatcaaattgttatgatgattacatgtgttaatatacattaagcatggagaatagtgtctggcatgcaaataatattagtactgggttttgtaccccctactcactgtgagcttcttgagaacaggtatcatgtgctttttgtgggcatcttcccaagtacccatcacaacacagggctggcacatgatatgcatgaaggttaagaacacaggttgagcagctggactgcctgagttcatattctggtttcatcctgggaccatctgcatggtactaactctcctcattcttgatttttctcatctgtaaaaatgaggtgaataaatgagacaataccagtaaagcatttcatttagcacaaagcctgacactaaaattgttagctaatattatccttagagatcaataaaaatgcttgcagaatacatagtcaacattccaataaaaaataccaagatgtgtccactttttttgtgcccctctcccttttttgctgtcgtagtggccaatcaattccctgtacctcaatttccatgttgactatatggtgataattctaccaaatgtttacttcccagaaggaccaagaagatggatgttcatgtttttaaagttgctctaagcgacctatggaaaattgcaagtgaaaagtattgttctcatcatgattattaattgattctccaaccactcatcagttggaatatgactgatccacagactctggaggaagatttatcacttgcctccccaaacctatggatgtgcctttcattaaatgcaattatctcccagccaatgcacgcgtcttgagtccaccacctcttactcaatgaaatcattaaacctctttgcagcaaggagccgtcaaaagccacctgatgaaaaatgaccatggattggtatttgcttttaattatacaatatctgctcttggagagtttcaaggatgttgctctgttgtctctgctccctctgtttttttcttttattcttaaatatggtttaatactcctttccatttctgtacatcacaacaccaagattttactgcttaggatctgtctgtaaaggcaatggagaatgcaaaggctacagttttcaccccctcttatgtatgtgtttgtatgtgtaagtgtaatacgtatcagtatatattgatacacacatcaatacataatacaatatatattaccaaagggaacacactgattaaagaaacacaaaaatttagcatcatttccaaacttaaatagtaaaaataaaaactacaaaaggagctgcacaccctaaatgtatcatgtgaaacaacaagcacattcaaaaatgtaaatttacatccaatttctctggtcttgtcatatcacatcagacccatttacaatggcaaaaccctaaggtactgctgtgaagaaagcatgtttgcttgctcttgggtgttctgcaaacaaatagcagagcccaaagcaaaaaaagcctgtcccggtgaagtctcccacattggtgaacaccaaagaatcaactcttctcactgggggttgagacatcaggttacacattgacagacagtatttggacttcagagtacagtgtgagaactagaatctttacatttaagacatatttcctttattcaagtgaaacaggattattggaacaataggcaggtctgtaacctgggaacaaggagttggttcagaccaataaagctacgagtgactgaatcaagtcagcaaagaacaacagtcaggcacgaaagtgttaaaagtacccaatttgaaaaccaaatgcaccccactatcctagttagtgtggaggtgataccaattgacttttaaaacctttggtccttcaaagtccatttggtatactttttatcattgctaccactggccacatactatacactttgttcactgtcaccacctcgggcatgccatgaccttgcatgtcagctgggttcaagtctgacttacagcccagctgtgaagcataagcttcagggtttcaggccaccttttggatccaacatggtcttaagtccatggtgacagaagctctgtcctatcccttcccacccatccctcatttctcatgtgagaggtgcttgtacgtcccacatttgaaacagatgctccaaccccaccaggaggtcaggagtttataattacatgcagtcataaatgtctgtcattcctgtgaaaaaccttgtagttcattttaataaatcaaaacattcacataatctcatgccatccaacacaaggaaaacacatccacctcccttttaacagggattgacccaagcaaaagaaaatcctctttaaatttctttgcttccacttaaattgcatgttttatttctcccaatcccagcaaaagcagagaaaccccatcatatccatcccaaactgattgcgagtagattaaggttatagggacccttgtcagatgcttgatacaaagggctcccaaatcccaggcacaaatgtgtctgcaaacagatggaagttaacagtgcaccagcccaaatgcttcatgattcagtttgattttgcaatgcagtttgcatccttgaaactgccagtctgggctccctcctttttaaaaatgtatttatttatttatttattttactcagccctcccttgttactgttttagaatgtagaataccagtgtatgtgcttcttcttaggaccgctccataggcaggagcctgcctcaggaaggatggacatatttgagaagggtgatgagtcactcagggatggctgtctagagctctccctttctgacatcctcaccaagaaagaaagccctcaaataaatattagtctttgtctcgcggaggccacaattcaacatgtaacacagtttccttgaaggaattttttgagccctcttatattagctataaacagacttaccaagcagaggatgaggtttaacagcagtaaggttcaaaggagggtggaaggctgagataatccacaaactggggaaaacttggggcatattgtgagggagggagaaacattaaagggagaaagaaaaccaccaaagataaatatccaccccctccaaccctgtgagctctgcctcttgccggcctcatcttacagaaagagcaagcccaagtgaggtgactgtaggtttggggcagacaacataaaccaccatgaagggcaatttctgtaggctgagttccaccagtgagatggagcagggatcactcttaggggtctgcaaggcccaaagcatggaaataaaggaaaatcttgagttatttcatgggaaatttcaggcatctagctagccctgagaagtaagtgagcaacttgtcaagcaagaaggtaatagtagcttaaaacagtatcccagaaagaatcatgggatgtttggttccctacaggaactaaagatagcattttttttttttttttgagacagggtctcactctaaagataacgtcttaacatatgtccctgagttgtttttcagaaatccagatccccaccaaatggatccgctggcacatagacctcagataaagaggaactgaggactgaattctgactgctgttctttgttctgaatttcttcctgaggggcctggaggtcagatgtaatattctgctgatcccaagcttttagagaaagcttcgcctcctaaaccaattgcaaattagaaaaattttggatgcacctatgtcttatgagcccctgcctcaagatgtcccacttttttaggtcaaaccaatgcctatccttcatgtatttgacttatgactttgcctgtaatgtctgcctccccacctttaaaaacccttacctgtaagtcattgggaagttggagtcttcagcgttagctgctcacctcttcttgcttggtgccttgccataaatgcctcactttctctcactgcagtccctatgtcagtgtttggctttgccgcactgagtgagcagaccccagcttggtttgataacaccagcaagagagtatttgaggatgtcttggaagccctaaaatgaggagcaacaagaactgttaacagatgaaaaaagcagaaaatggagtgaaggaaagaagacgtaatgaagctggctatctggagatggaacattcagtttctcagttgcaagtctctgaaataccctgtgtgtagctgagatattttcccaaagttccacaatgcatatgagcaatgaggccatacaagcttgtccaacccaccttattttgttgttgttctgctttgttttgtttgttttaggctttcagcagcccaaagccatggtttttagtttctgtctctagtgattaagtggaaatgagagatgcgaaaggggctttactggcctaaccagaaacagaaactaaggacccatgactgtattctctcccttggacaaccttgtatggagtaacaaagggccattggatcattcctcaggtgccccatcaagattaactaccgttgacaatgcctcataatgataagtggaaaagagagatgaaaaggggctttactggcctaaccagaaacagaaactaaggacccatgactgtattctctctcttggacaaccttgtatggagtaaggaagggccacgggatcatcccttgtgtgccccattaagattaactaccactgacaatgccttattctccagcagctcaggtctttgatgctaggtgccagtgctgaatggatgtgaaagttctctgtgcactttgacttacggcccaagtgtccttcctccaacagccttcctcagaactttacgctgatatttagtcacaagcaagtgaacattcctgaaggacatcagaatgacttctatgtatttttttgtgttatattatttgggactgtcaaatcataattgaatatatttatggagtataagtaatgttttgatacattcatacattgtgggatgatcaaatcgagctagtcaatgtatctgtcacctcaaatattcgtcaaattttttgtgagaacacttaaaatcctctcttttagctattttgaaacaggcagtacattattacttattgtaatcaccatgctgtgcagtagaccaccagaagtcattcgtcctaactgaaacttcacactctttcaccaaagtctcccctttacccacccatggaccctccccaagaatgaacaatttggagtagaagatagatttcacgatattacgtaaaatacattcctacattctcctttcaaaaagaagcaagaaataaaaaaatcaaaaacatcaaagctaaagcagccctaagtgtaacttgaaactgcctgaaggagggcaggggagggatcacataattgcagtgagaagttctgttttgccaaatacttgagtggaaaaattattgttccaaagacccagtaagtgtgacaacttacttgtcaaaacattaattcacattttgctttgatggagagaatttagattttaaaatatatctgcaggggtacttaaagcagtcacatctcatgtttagtatagttgtcattaacaatttcaaagttttgggggctagaggtctttcccccaattaatgagactaagtccaaaaggcttctgaccctctatgttctttatatttgatgatgctgccttgttaggtttttgtcacttttgccccgtgcaatcttttagctctaacacaagtgtttcttacttataaaaatagtaggaagcttgaggtacgtagacaaaatgtgacagtagtgatattagtgcagcgggttacagtcctatccacatagaaaatgaaaattttacgtcctaagcaagaagttggcagcatgcaactgtaagaggcaccacagattccccatagatgcacctggttaaaagacagcctcctccttaacaataccagaagaaagctatagaacttgtgagtttataaaaatttaaaaagattagttaagatctgaacccgtaatatgaaatgagttttatttaaattcctaaagacaaacaagtacaaatgtaagaatacaacaacttatcaataaggcagtttcacagcagtatatttctgaagctgctcaccagtcacttcttcctaagtcatcactggaacacttagaggacggtgttgagggtttttccctgtcagaggcctgagctgtctcttactctttatttgtcctcactcatttcagctggtgtccattgttatttttcactttcgcccaagtcacttcctattaatccagttgtatttgtctgtctgtagttgatcaacagagctgagatattttgccttaaccacacaatcttcattaactgcattagtgttgttcttcatttgtttctcattcattatttctcatcctgaaaatatttatggaatacttactctatggcagagtttgttactctcatcacaactgacgtttggggctgagtaattctttgttgtggaagattgtcctgtgcattgtgggatgtgtagcatcatccctcgcctctacccactagatgcaagtaacacctctccccccagctgtcacaaccgaaaatgcctccagacattgccagatatcctctggaaggcaaaatcacccttggttgagaaccactgctctctgtcaatcacggttctagaagctatggatacagaaatgaagaaaatcttgaaactgtaaatgcatgcaatataacatgttgacataagaaaatctccttagttactagcctatgtgccctgtttgaaataaatgatctatataaaatccactgcaggctgggagggtatttatagacccacaaggctgtaggtggcagcaaaaggcattttctgggttgaattctccctggaagggtcctcttatctacactcaaagcatttttctccccagtcattcatccaacaaatatttattgagagtccactggttaccaggcatgttatgcttgtttccccttctccctttgattagctttctccatgacctccagaactagccactagccactgttgggggttttaaaagctattcatttgcagtaccatgctgcctccccaaagcatttctatttaactgccatgtgcctactccatatggaatacacaggaggtctggaaattcacgattcaattaacaggaatttaattagtgcctactctttgtgaggtagattaagaagaatatggtatgtgtccttcacttgaccatgagccattctggaagttgggacatcttgtttcagaagccctgggagcgttttcctagcagatcaaagtctaccagagagaactgttcagggtggttcccacaaaggtttatagtatccatcatcagcaatctaatgtgtatatgactttacagaaaaggtttcatttttcttttaaaaattctccatttgccgcacacacactggtaacttggtcatagttgctggggtggattatagatgtctaaagatgtctcgtgtaatatttttaccacttctgccattgagcagtggagtctatttcccctcttctggagtctcctagctttgacccatagaatgtggcaggagtatactctgtaacttccatggccatgctgtaggagatctgcggtggctgcttccagccatttgcagtactttctcttggaatatcattgcaatgctgtgaaaacctcaagccatgcagaggagcactgaggtgctccaatggacagccctagctgtctcttcaaacagcagggagccttcactggcagccatggaggtgagactattttgaattttccagttgttctgcagccctagccaataacacgtggagcatagattagctgtccctggcgaactctgccaaaattgcagaattgtgagcaaatacatgatgttttttgttttaagccacagttgtttcttggattgttactcatcaatcgattcaatagacaacaaagacagttacttctcaaaatttcttccctctgaactctctccaactttctgctgattaggaagtccagtccctaatggcctagttgactgtccctggcatgggctttcaatttagcttctccatccatttttttctctatccgtgatgaattgtcttgcctttggggaagaaatagaccattccccaaaacttacccacttactctttcttgctcttacttgagtctagatttggaccacgagactctcactttaactggttaaccaagaagattgatcattttctagttatagattcaatttatactatcgttttctgaagtaggaagtcccctctggttttttttttttttttttttttttttttttttgagacagagtcttcctctgtcacccaggctggactgcagtggcacaatctcggctcactgcaacctctgcctaccaggttcaagtgattctcctgcctcagcctcccgagtaactgggattacaggttcccaccaaagtaactgggattacaggtttccaccaccacgccctgctaatttttgtattttgtattttatttatttatttatttatttatttatttatttatttatttattttgagatagagactccctctatcacccaggctggagtgcagtggtgcaatctcagctcactgcaatctccgcctcctgggttcaagcgattctcctgtctcagcctcccaagtagctgggattacaggcacacaccatcatgcctggctaatttttgtatttttagtagagatgggatttcactatgttggtcaggctggtcttgaactcctgacttcaggtgatccaccggccttggcttcccaaagtgctgggataacaggtgtgagccaccatgcccagcctaatttttgtatttttcgtacagttggggtttcaccatgttagccaggctggttttgaactcctgacctcaagtgatccaccaactcggcctcccaaagtgctgggattacagccttcttttgaatcacagggatgttaatcagtgtgcagtaaagactgaacataaaaatggcgaatggatataaatgctgttgttgggaactatggtcctagctgaggggcaccaagattagaagaaaacactcaccacccacgatgaactccaacaggactccctgtcagattttccaacaaaatgccccttgtaaatcacttttaggggcctttgaatccctaaatttcagcaaagtcctgttgagatgctgtatatgcttttcttatatgaaatatttaatggtccatctcagccccttgtagcaggctaatgcatttcctctcctgttttatcagcagtgttttgtgttagtcatttataccacggggtggacttctcagcccctacctccctgcacccacccacccaatcttgttatgatgttcatttgtcacatgcagtactgtggttccttagagaaacacaattgatatgccatcaaattgctcctgacagagtggttttaaaagcttttagagcggatgtacaggggaaagttttgtcttcacggagtcagtgtggctcatctgtctttattaaatgtctaacagttacactgaacaagaatgacattttaaataagagtaagtactgcttaactttttaatgtcatttttttagagccaaggatttgaatttttttggtaaatgtacatagctcagtttataatataggctttcatttttttctccactctttcctccattgcaaatatctaaatgtctctattttcagttgagttggtagaatctgtctctcttgagatgttcggggatttctttttaaaggcattggcagatttctttctgtacaggcttaaagttagccagtcttgtctggattcagggggttacaaaagtagcatcagcagcaaagactgctgagtacagggaagttgggaaacatcatgtgaaagacaaggaactggatatttacaagtcaacagtcaggtgggcaatagaatcccaaagaatacaaaggctaaatgatcactgatccagctggcatgttccagtccttgcaaatagctgcctaaaggcctctaggcctgcaggggcaaactgaggcaggagctcatgtgcactgtggggcaatgcacccgagagagcagaggagcagcaccagaagcaaagtatgggccttaccaccaaggccacctgtcccagctgcaggcctttattttaagagatttgattctggacgagcatagttttcccaagctctttgctgaatttcagttttatttctctgaggctttgaaagtttatgaacgtatgccatatagagtgtagttttccttaggttccataaggaaaactgtcttcctcttcaaaataaaaccaaactctcctaggcttggcactggaaagagcatctccggatgagaagagaaggttgaaccactggactcctctgtgccctaaatcaacttcaggctgcagatcatcttctttattgctgccttgtgtgctccactcctctgttcagtggatggaaatctctttcacctgatgtgtcattagcactgctgaccaaactggaatttaccaaattaaaaaaacaaaactcagaaaagcttcaaccttctgacttattttgttattttttttttttttttttttttaagacaagttatttctctatcatccaggctggagtgcagtggcgtgatttgatcatagctcactgcagcttcaaatgcttgagcttaaggaattctcctgactcaacctcctgagtggctgtgactacaggtgcatgccagtgtatccagctaatttttaaaagtgttttttgtagagacagggtcttttactttgttgcgcaggctggtcttgaactcctggcctcaaacaatcctttccactcagcttcccaaagttctgggatgacttataaaatacatgtttttgatcctgttatgagaagtctgtagaaacgctacctctagaaaatgtactgttcacactccaagatatttctctatagatggacatgtacatacacatgcgcacacacacatcatatccatttaacagggctcagcccaaatgtcaccttctctgttcactacagccaattacagtttcttctttctctatgtcagggcttttctaataatatgtccccagcccttgtagtgctccaggcattaggccatagaaataccccttaatatgcaccatttgtgtagcatacttacgtaactgtaggcctagcagcattaactaaggagattgcctgtgtagacactgaaatttccaactgctagttcctttccaagtcatgttgattaggtttcttaaagaggatcttcaactctagattcagggaatactcgattagaatggatcacacacacacacacacacacacacacacacacacacacacagtgtattcactttctgaaagtttattagacaatgacccaagatgcaaatgtttagttacaattttaagccacattcaagatcttgtttaaacacaaaaaacacatgcctgaagaatgaagagtgaacgccaaagcatccaccctaggcctgttcattatctcctgcacctccacctgcatctgttggcttcttgggtcttgtgctggtcatccccaggctccagaggccctctgcacatcttctcagggtctgattagtatggtcaagtgatttgttgccacactgtggaaaatctttttctgagatggtcacgcctgcattactgctgccaccactgagattgctgtggtggtgctttcatttggattttacagcttggcattttgccatctgtgagcccagactctctctctgtctgtcttctctactcattacctcctctgaggcttctctttctgacttcacaattccatctcaaactttacatcctctcagggaccctgactttagctccctggccacagggtctcagtctcactggccccatctctcttcttcagccttgaggaccttgcatgccgctcacttgctacactttggtctcacatcctcccactcaaaaagtgatggaaactgaggcttctggggcagatcactggggtcagattgggaaaagcctggaataccacaccaaggaatttgcattctttaggggatgtaaagcctgtttttcatgttttcaattccaagctacaactttgaggatttttagattttggaacacatgtgatttggagaagggcttacagtctctcaggggaccatttggggagaaaaaccacacagtatgattattgtatttaaataaacactggtgttggttcagagcactattccctgtaattgcctacttacagaagtatgcaatgctagaacaaaaacttcacctgttttccccgtgtggtttctgaaaatggatatttacactgacacagtacacttttttcaacttggaaaaatatatcacccttttattttcaggcagatcatggaaccatttgttttttaatgtgagggatggtcgtgggcaggtaagctgctggatgtggaaagggaaccagtctcccatcactttctcctcaggtgaagttgaaagctcagcctgttgcccacgaggttagctgtctagaatccacagagggccatccctgggcaaaaatgaagaagtaggcaggggcatttctctgtaagcctactttaatctccccattctcttttatgccccactctccaggcctcattgctgggcagtttcgtcccaggctctgtgccttcaagcagctcagaagcctatgtttccttcctgtttggtctatttatatttcccctccaagccaacacactgcctttccttccctgtgacagtgatattcagatttttccttctgtcttatctggattcaatttcataccaaaccaactagaaatggagtttagttctcccaagtgaataggcacagtttctcttgagctacagtctagtgtggagtgtagagtcctttgatgaggagttctaacactaatgacaagctattgcttctctttgaggcttgatttccatagctgtacaatgattgtgaaatatacagtaagagccacaaaatagcctttactcacacagcactttcaggactctaatggcaccccacacatttcttcccagattgctctgagcatcccctagtgtttctaacacatatttttagaaagcacttgacttggcagtacaagatctctgccattgtcttattccttcttgctccttctcaccgtaagcccacatagccgtgccaccagcatccatgacaggctccaccactgttagctgagcatcaccaaagtcctcatggttcctactggtcccgatttctgtgtaatggctggcactacccaatgtttctggcaagggttgccatgcctgatgtctggggtccagctgctgctgccagtgctgcctcttctgctgccaaccccactcttttcatcctcctgctgcttccaccaacatttctgctgccatcgccaaaattacagatgctgccagcactgcagctttgcttcccccctgctgtcttgttgctgcattgccatgggcatcaggcaagggttcaggggcctaggccaaatggcactgtggccacttgtatgtctccctcctggaaaatgcaggctatccaataaaggggagagaggaacagggcagagcactataaaaggcagtgagtgattggtaaagttaactgggatatgtatatatatttcatctttctagactgtggtttcatacgattcagttaagaatacttgatcccaatatcctttcaacacttcagcatctgtgagtcttttcagtggagacccagaacctctaagtggatggaatagggcaggtggtataggcttgtggcagatcccggagaagaaccaatgccacttgatgttttttttttttttattccatggcattccctgtgtgagactgtgcatgtgtgcttatgtgtgcatgtgtgttctctgtatctggagtcactactacaagtttttcagagcaggggttggttctcattataatcacattaacctccaagcatgcactctgatgccaagctgtaggattccataaatgtttgatgagaagtttgtttgtttttcattcagaacattttttttattattaaaagctccaaatgactaggaacaaagtgcttaatattctccagcaactccacccagtcagcacatcaaaagttaccaaaaagggacaagagaaatcaaagagatgcaaatgaacataatgtcaccaccttgcctttattgtacttaaaaaaaaaaaaagattcagaaaaattttctcactaacacaaatctgttattcattaaatattggtgatgtggacagggacatgggacatttgtatctgtgcaagccacaacttaggccttagctcctctcctgctagagttcagaaatctttggacatgattgttaagatttgggtaacaataaacccaaaataactggatttacctttattttcctgcaccttcccttcaagaacttcagccttttatattcttcccaaatagctatagaagtcctcagaggatctaagttgtgtttgtaaaatcagccatattgacaactacatggatctttgactttttcttcctgctcccgcagaacaccgtggtgaaatttgcagcaccatccggtgccaaatttagcatccaggtcactggtgccacggaaagcgttgccactgatgcttgtgccgggaaaggcacctctcctctgcttcagtgtccatgctaagggtgctcatacccaaggctgcaggtgccattgtttccctctattagtgtctccaggggcttactgaagggtcttttcatcctgggagcagcctatggtcttgccctttctcagtatttgtcatcctgccttgcctgagtgccattacttcagagctaagaaagaagatgctcagtggttttaattaggttaaactaatccctcctggtatgttacccttccaggaaacctaatgcctcacactgacaaaaatgcacccagtggatcttaaaaagtagtagagattatgccaggcgttggcctcgtttgaaaggaaggatctggcttttcctggaaataataaccgcctgttttctctttgcatcagatcagctccctcttcttcctcactgctccttcttttcctgacctccattcctatggattagctaattagtacaagcaccacatagatgaggctttatagcaagggtagaaagagcagatgatgttgggagcatggagaatgatatagctaattaaaacaacaacaacaatattcaacaacaacaaaaaccagcagctgcctcccttctgcttctggagggaaaactttgaatcattttgtgaagttgattgagatgtacagagcattggaggaatgaatagtagtattattacattcaaattacatggttctccctgaaatatgagagtgaatatagtgtaataagaacacaaattttcttcctgactcaccacttccaaactctgcaaccttggacaagttactcaccctctctgggcttcagttttcatatctatcacaaggagaaaatactagtgtctgtcccatagacttgttagaaaaatgtaaacaaagaaagacctatgtaatagaattgtagctgatacaacattagtactttataaatattagctatgacctgaaatttgccattataattattatttaggcactgccacccacatttagttctgcagtttatgtggtttgattatttttccctagagaaggctcatggctttttggctattaagcattttttttcctgttggtattttagaaagatataaaatggcatctcagaagggcctctagctattggaaaggtgaatcgcccgttggtttaattagaagagatattttcaggtggtgccctgaaaaatgagatgatgttttttgaagagctactgctaccggggagatagcttatcacggtgtgggtttccacaatgccgggagctaagttccaggaataaaccgagctaagaaatatattctgagtattgaatgtgattacgaggggtagggagcctgaaaacatgtgacattaaggcaattttcttagggacagaaagtcatactctattaggtcttttggcctcataaagtgttctaggcctgtatgggtattttgtgtttgtcagggtggacaagattgtgctgagaaactacctaatccccatcccagtggcttaataacacagagttatttctcactcctaatacctgctgagtagaagcagctgcaggggtgagtcctatgtgtctcctccacttatcagcccagatctccaggctggtggagcctccacctttaataacagccattctcaaactttttaatttcctaaattcctttacattcttaaaaaatatatacaagacatttgttcatatgatttataactatagatatttactgtattatgcactaaaactgagatgtaaaatatttatttactcatttaaaagtaagtatatagccaatacatgttgagataaataacacttcatggaaaatgaccacattttccaaaacaaaacaaaagaacgactctgttttgcatttcctggtctctttaatgtctagcttatttaaggacagctggattcccatatctgcttctgcatttaatctattgccacatgcttttttgcttgaagagaaaacctaggctttcacagaaatgtgattagaaaagaaacaatctcttggacccctataatggtcttaagaaagctcaggggtccttggatcacagtttgaggactgctgaagtaaaacttttccagtcactgtggctgaaaacaggagtgatagttctccagctctttaatatcagaaggaatgtaagtcgcttttgcttataatttgttgcgtacaactcaccacatgatcaagcctaacttcaattaaggctgggaaatacgggaaaacaaatggagtaattaatgaggaacactgtttctgccacaaaatcatctacttcatatcttggtagtccttcctttccttcccacctccctccccagttacttgcttgccagtgacttcttcatttcctttccttttcttcttttcttttttaatgctgacctgtagagtattgaaatcaaactcaatggaagttggttcagaaaatgggatatcagggagagctgaggcagattggcaagccttgagctgcctttattgcaactgtgtgacaccttcctcttgttcctttgtatctttttcatctactcttctgctgtagctgtgttcccttgggctattttgaccctctcaaaattaaaattctattggcattttttctgtctgctcacattcaaatccatggtttgccagacattgtattcacatcaactatttcctcaaagcagttctcagatgtgaagtagagatgattcaccttgggcttctggaactttcagcatccatgtctgcctgaggccttctgttatccattgctctaggccactattgcccagatattagcatgcatatgaatcacctggggctcttgtaaatgcagattctgattcagtaggttgtagggtgagactgagattctacatttctaacaagctccaaggtgatgtggatgctgttggtcctggatcacattttgagttataaggctgtaaacccaaccccaacatatatatcctctggggagccattcctcttgatgatttgcctcttactccagaagagactttggctaatcttccaaatctagccaatcatttgaaactcactgtgaatcccatccgctacacactttgtaccaccaacatacttgaagatgttcaagtcctcacgttagaaatatgatcgttttatggtttctaataattgcccagaacttggtatgatgaatcttctttcctactttgcaagtagctctcttaaaatttgctgagagtctatcatttttcagttgtatgcatttacttacaaatacaaatttggatttctaaggttcactttccttatagctggtaatctctcttctgtgcctgggcaggtgctccatgtagcaatctaggcttaggagaaaggagaaaaaggtaggttggtttggtgctcacacatcatgtccccttttaattctggtgctagtggactagagaaattgagaaggaatagattagagtctcctcacttgacatggctgagcttcgctcctcattagccatgactgctcttcagcctcactatctgcagactcagcacagacaggtggtgggtaccacacgcattgctgatgaggggcacatctgtgaacagctgcctagttgtggtgatccctttggccacatccttcagttggcagaaccatacttactttctcttaaccctcaaactagagttgtattagaaatacagaggcccccaaatttaccttctcagacctttaaatccaagcaacatctgatgttttatcttatccaaaatgaagaactcaaaagaagggagaaggagaactggtacttcttgctctacccctctccatgagactttctgtccctatttctggttttctcactctggtggtataggacagatcagctagttcactggctaagatatacactgcaaagaggaatagaatgtaaacattctcttttctttccttgttgcaaacttcctcaatcttttcaggttatcctcttcatctcagggtagaaaaatatgttctttcatcctccataagaggggatgaatgaggcaaaaatgcatttaataaagactacagtttccaaaaatgctcctacctttctcaccactctgtcatttatattgaacaggaaagcgggggcgtggttggtgtgagaaagggttctttgacaattctcagtaagcccagcaggaatggagctatctcatgggtcctacgggaccctgaacttcaaggggaatttagttcctttattctcaacactgggcctttaacatgagtgcacgacaactggaaacatcccagttgactgcctgttagatgtgtgtatgtgttgcatcagatctgatcatcagttgagtgaagattcgtgaccatttttttgtttatcaaaaccgtatcaagtggaacttgggcaaatgaatggtttctatttttttttctcagctgttctggtgctgtgtacactgtcagaattaggtcaagggaaggtagttattctaatttgctaacacttgctgtgtctgagaatgtttaatgcaaccacagagaaaaaacagacatgtttaaaaggtatggtatgtctgtgacatgtgctatcccttgacacatttgtgtcacaggtgccgattcctgcagtttactggtgttccacacttcagttctgcaactgcaaaaggtgatgagtagaggttgtgcttgcctcagctgggggcagcactccccaatcaaagatcaagcatacagactggcaggaaatttaacaattccctttcccattcatggaaattcaagctcttttgtcatcatattgtttttatttgtatactatatagcttgctgagcctctcatgagattttgaatatgaaactgatcaattaggtaaaaagcaacttaatttttaaaaaactcaacctcgtcaccctgcatcacttcagtgtggtgctattgaatgcaaatgtcagaaatagcctcttccacccgattaattatgaaccaaagagatcatcagagagtaaggttgccccaaggtctgtgttccttcttggcctctgtccatcaatcttctggatcagtggtcttcaagcattttgactcaaacacacccccttaaagagttttgaaataccatgtactgtctcatacattttaacagaaaaattttgagataatcatctattcacatgcatttcacatgtcataaataatacaaagagacctgtatgctctttccctcgtttcgcacaatggtatcatcttgtaaaactgtagtacaatattccaaccaagatgttgtcattgatacagtgagatacagactatgtctatcactacaagtatcactcatgttgctcttcaatagcaacacccacttctctgccagcctcatcccctccttaacccttaacaaccactagtctgttctccattgctatagttttgttgttttaagaatgtcatacaggccgggcatggtggcttacgcctgtaatcccaatactttgggaggctgaagcaggcagatcacgaggtcaggagatctagaccatcctggctaacatggtgaaacctcctgtctctactgaaaatacaaaaaattagccaggcatggtggcgggtgcctgtagtcccagctacttgagaggttaaggcaggagaatggcgtgaacctggaaggcagagcttgcagtgagccgagatcgtgccactgcactctagcctgggtgacagagtgagactccgtctcaaaaaaaaaaaaaaaagaatgtcatacaaatggaaccatacagtccgtgacatttggggattgggattccttacttatcattattctctggagattcatgcaggttgttcagttggaccattcacccattgaaggacatgtgggttgtttccaggtttgggctattatgagtaaagccacgaaaaatatgtgtatctagtttttgtgtgaacacaagacttcatttctctgggataaatgcccagaagcacaatttgcatgtttagtttttagttttgtttgtttatttttaaataaactttattttttagagcaaaatttcaggttcacagcaaaattgagaagaaggtacagatatgttccctatatcctctgccaccacacgttgtttagttttttaagaaattgccagattgccttccagattagctgtaacattttacattctcatcacaatgtatgaagtcatcctgtttctctgaattctcaccagcatttggtgttttcacaacttaaacaaaaattagccattctgataggtatatagtgatatctcagtgtggttttattttgtgttttcctaatgactaatgatgttgaatatattttcttgtgctaaccatatatctccttgcttggaatgtcccttcatatcttttgtccatttctaatttctcctgcctcagcctcccaagtagctgggattacaggcatgcaccaccagagctaatttttgtatttttagtagagatgggatttcaccatgttggtcaggctggtctcgaactcctgacctcaagtgatccacctgcctcagcctcccaaagtgctgggattacaggtgtgagccactgtgcctggcccgtaacttcttttttaatcctcttaacaggacctttcacagagcaaaagttttcaattttgaagttcaatttatgtacatttcctctcatagattgtgtttttggtgtcaagtctaagaactcctttcctagtcctagatcctaaaaatattttcctatttttttctaaaagttttacatttttccattttgcatttgagctgtgatctattttgtgttaattttatgtaagatgtaaaatgtaggtcaggcttcacttctttacctatggagaaccaattgctctagcaccatttgtgtaaaaagctacctcttccccatttggttgattttgtacttttgtcaaaaatgtgtccatttctgggtcctctgttccattgtactatgtgttgatttttccaccaatatgacagtcttgattgctgtaactataaaataaatctcaatattgagttaaatagattcttccctctttaatcttcttttttaaaattcgtttcagtatcctagttcctttgccttctcatatacattttagaataatgttatttatacgtacaaaagtttttcttggattttgctagaaatcgtgttaacctgtatatcaatttgggtagaattgatgtctttattaccttgaatcttccaaccaatgaacacagtatgtctctcaataggtttttaattccttttatcatcattgcatagttttcagccaacaaattctgtgtatgttttattggatttacatctaaatgtgttcttttttgagtgattgtaaatgatgttatatttttaatttccatgtcaggtgtttattactagcataagaaatagaattatgtttcatgtatattgtatcttgcaaccttgctgaactcccttatgagttctaggagtttttgtagataccttagatttttctaggtagacaatcatatcatctgcaatacattgtttttttctttttcaattgctatgccttttatttccttttcttgccttattgaactggctagaacactatgttgaataaaagtggtgagaatagacatccttggtttccaatcttataggaaaatcattcaatctttcagcattaactataatgttgactatagtttttttttttggtagatacattatatcaggttgaaaatgttcccctctattcatattcttcagagagtttattttttaatcatgagtggtcattgacttttgccaattgctttttctgcatcaattgatatcattgtgtgaattttctcctttagcttttttcttgagacagagtctctctctctgtcgcaaagactgcagtgcagggatgtgatcttggctcactgaaacctccccgcctcctggagtagctagaattacaggcgcatgccaccacacccagctaatttttgtacttttagtagagacagggtttcaccatgttggccaggctagtctcaaactcctaatttcaggtgattcacctgcctcagcctcccaaagtgctgggattacaggcgtgagcccccatgcacagcccttagcttatcattattattattattttatattttcagtatattaaaaaggaacagtacgaacgctgtggtattaaaaaggatccttatttttcaacaaatgaacttttataaacaattctgtaatgaaatgaaaacagtatcttaatacattacaagtttttgttaaacaagattttaaaattttaaaattagaaaacgttaagattaaattctttcaaaggttcaaacaaaaaaaacaacctgtacagtctccattacatgtgtctttgtacacattctgggcactttgaaaatgttaaagtttttaacgtttgactgacagaagtagcacttaaaggcttcatgaatcttttttccaaaaaagtatgctttcagtaaaacattttaccattttatctaactgtgcactgacatttttattcttcctgaaaaggggatttatgctaacactgtatttttcatgtaaaaatatacgtgtagagatattttaacttcctgagtgacttatacctcaaatgtggtttcatgaacaatgtctaaattttagaatgaaacagtatgtgtagatctacacatgtatgttcaattagggtaaagctcaagagcatgtcacagaaattatacctaaattatataagaagataagcaatgcctttatccccaaactttaccaataagccttctcaaatagaatgttagtaaagtgaatcactgaaaagtttcatttttgaattaactaaaataccagtagccattttagactgtcaacctggatgttttcttgattcactagcaagaaatttcttgcaatacaaaaagataacaaataattaaaatatctgctttatcatacaacttcaccccctcctaaagtgtctaaaatgattaggaattgtagcaccatcttttgcataaaaccctttcctcttcataaaaccctgaggtgaaaggttattaatgtaataaaaccacaattcattttgtattaaactgtagctttaaaaaaatgtataaagaaatgtgacaacttgtaaagctgctctgtacagtttttcaacaaaatatttccatatcaacttagtcaaagggcctaaaatgaccctataaaaacaatgtgcttttaacatgtgttagtgtcgagatgagcgccattttccatctctgctactgtctcttctgttatcatagtcatggctccagccatcatgattcctatcttcatagaagaaatcatctctttcctctgtaatgatggtcagacccatgatcagtgtaacgctgttcccggctataatgtctatctgctaggtagggatgagaattcattctgactttacgctgtgatgatggtgtaccttggcgccactgggagcttgaagactgattaaaactatgactgtgtgattgaactgatggtgaaaatcctgattgatccagaggtgaagaagcaaattttccaccatatgacatttgtctcaaagcactgttcatcactgcttgtctctgaaaattttctggagaagagaaagatctctgaattatctgtgctgatgaagtcatgttatccctagtcctttcgtacctgctaggagttgtggaggtagggcttgaatttccaacatgatattggggatatggcaaactgacatcttgcgaggcatgactacttcctgatctaaattgaattttgataggccttccataaagtttgattccattaagtagattcattgcataaggaacagatacttcatgtttgaaattcacaaacgcaaactgctttggtttaccatccttatcttttggaatttcacctttattactggcccagcctggtggaaaacctcgaaaaggagctcctcggtcactttcatttcaaggttgcccacaaagaactagcttattattatagtagattatattgattgattttccaatattaagccagccttgtatccttgatataaactccacttggtcattttatatatatataaatgatatattgctgggacaggagatttctcttgagattttctctttgatccataaattaagaagtgtgttgtttagttttcaggtgtttggagattttctttttatcactctgctactgatttcaagtttgattttattgtggtcagagaacacattttgtatgatttcaattttttttaatttgttgatgctggttttatgacccaggatatggtatatcttggtataggttctatggacacttgaagagaatctgtattctgctattgctgggtggaatgttctacaagtgttggctatatcctaatgattgagtattgtatcttattgattggtactgttgagttcttctatatctttgtttttcagtctagttgctctaattgttgagaagaaagtattgaaatctacagcaataattgtagagttgtctattctttcagttctatcagtttttgcttcacatattttataactctggtttttaatacatacatatttagggttgcttttttcattgattaacactttaatatcacctgtctctctttgactctgatagttttgtttgctctgaattctacttaatctgatattaatatagccaattctgctttttttcattaataatatttatattttcatatatatgtattttttcatccttctgtatgtatgtatttttcatccttctacttatattattacttctacttcctatattattatatttgaagtgattttcttatagagagcatatagttggataatggttttggatccagtcttctaatatatacgttttaattggcatatttaggttatttgcatttaatgtaattattggtatgctaaagcttaagtctgccattttattttttgttttctgtttgttttctctgtttttactttgctgttttcttttcctgtcttcctatgtattacttgatcattttttcttttatggaattctgttttacttatctataatatatctcttggcatagcctttttaatagttgacctaggcaatacattctttacacataaattatatatattgatattttcatattaccaattctagtgaagtttagaaatatttatctgcctttatgtccctttatcctcactttatttatagttattgtcaatattttatatgtgtacatttagaatcaaactagacagtgttgtaattttataatttttgcttcaaccatcaaatataatttagaatactcaggagagaaggtaggtattttgtattttcctgtatttttgcttaccatatttttcttttttctttatattctagccttcccccaacccctccccctttcctttcctttcttacctttcctttcctttctttcctttccttttgtttagagagccgtctttagcccttcttttgggggaggtctattgataacaaagtcttacattttcttcaatagagcatgtaatggtttcctccttaaagaatattttcattggatgtagaattatggttaacagttcttattttcagtcttggaaaatattgtgccacttccttctggtctccctgacttttgataagaaatctactcttatttgaacagcttttcccaacttttggttttttttttttttttttctagataagacttgtattttttcttaattttcggaagtgtaaaagtggtgtgccttaatagggatttctttcaggttacactgcttagggttttctgagcttcttgaacctgtaactttatatttccagacacatttttgaagtttttagttcttattcctttgactacttttccagccacatgctttttctcttctccttcaggacctcaacttacaggaatgtcagatcttttatagtaccataggtccctaaggctttgttaattaatttattttttttttcaatctggtttctctctgttgttcaaaagattggctagttcctgatttttttctttccttttttttttaattttccagttcaccaattctttcctccatctcttctattctgctattaagctcatccactgaaattttaatttttgttattgcattgttttggttctaaaagttacatgtagtttttaaaaatatcttctacttctttgttgaaattatccatttctttgataaggccttctatttattgtttgtttcaagtgtgttagtaattgctctttgaagcatttttttcatacctgcattacaagaagtggaagtctagaagtctctgttgacatgtaagtggggaaaactcccattgctgctggaaaggattgggagttctggcttttcatgtctcctgtgctgacatcttagtggggatgaccggattatcactggctgatggtaaagacctgactcttcacaggcctcttctgatgtcatgtcaacagagtaggatgatggtatttcaagctcctcacatagtctccactaagacccctggcaagttttcttattatgtggatcacagtcttggcgttctacttgggcttctctgataccaccctggtgtgaatgttggaacatgtcattacagcctcataagggtggaagtctcagctccccacttggcctttgctggcctacatgaggttggaggcacagtttttttcaatggtgtttacctaaagtggctattatctaaaatttttctacattaacaggctttcccttttatgatcctttggttagagaaagcagctttgatgtcatgatattgtgatatattaagaaatatatatttgatctttgaccctagttcctggcacagagctccaaaaacctttgaaattttctgagtggtaggagtgagaggatcatgttttgttattcttaatatgcacattttcaaccatacctgagtttagtttatgctaaggaatgactcttaggggatggggcatattgtcaaggaaagagttttatgattaaagggttggaactttcacccccactctactttcccatctccaagaccttcagggagaggaggactggagattgactcagtcagcaaaggccaatgatttaatcaaccatgcctaggcagtgaagcttccattaaaacctaagggatggggtcagagagctgctgggttgctgaacacatggaggggttgggaggatggtgtgtttggaaagggcatggaagctccatgccacctcctaactcccataccttagcttattcatctcttctatttggctgttggctgtttctgagttgtatccttaggtcaatgtttttctgcattccgtgagttattctagcaaattgtcaaacctgaggaaggtcatgggaacccctgatttatagccagttgatcagatgacaggtcacagtctggggcttgtgatctgtgtctgaagctgggaggggtgcagtcttgtgggaatgagccctttacttgtgggatttgtattaactctgggaagctggtgtcatagttgaattgtgggacactcagttggtgtctggagagctggaaaattgtttggtatggaaaaccctcacgttttctgtcagaattaggaagcagtttgtttttcttttaggttgggtctttttttttgtctgtgccgtcagcttcaagtgtaagatattacagaaagaaaacccaggggactcaccactgtccttctacagatcctgtaatccctagccagcctgacttcttcttgcatttcattcttcttacacttgttttatacataatggccacagattttactggtacttagcaggaggaataggaaaaaaaagtatatatatatattagtaattgccattattgttaatggcaaaaatcacacttacttttgcaccaacctaacgctgtatcttccaagaagtctatctcacacattttgtttatatttaaacattttaattaaagttcaaatatatttttcttgttattagaagcttgacaatatgaaacagctcagagagtgaaataagaggaatcattataattgaaataaatatacaaggttattttatcaaaaagttttaaaccacattttagaaaataatatttagctttatccctttggtgcttggaagtatgtctattctcagggcaatgcagtaatgatatttatgttggctaacagttatgcaatctttggtaaaatgggaggacttttgaaaaaagatacatcatacattcttgggcaatttgagagagtaaatacagtgaaaatatggaatttgtttccctcataactgtccttgaatgtggacctgagggtaccagtgttaaagatcattgttctaaccaaaatttgcttaagcaaaacatctgcctagacctttagcctaaaagataactacagtcagatattcttctctggccatattcagaatttgtcttgaatggttatcaggaattagttgtaatgcacggattttttttccatcatttcactaatgcattcagcttgagttttccattcagctcttagagggaaaaatgcctgaaaataaagtagctaatacgtgattgtaactggaatttccagtagagccttaggaaaggtgtgctttgataatattgatagagataaagcaggggctctgcggctgtttgtgagggaagcatttaatcagcgtgtatttgtgtgctcactttactgaaacactttttcccactttttattctttgccataaccagtctaccctgaggacacaaaatcagtgccttgggggagaagcagggaatggctgtacgtttgtttatttcatctcctgaataggtatcagagaggcaccaccaggggaggggcatggctgggtgcagtaccagaggaaaggagcagaggtatttgttctctgcactccctttctttccccctccagcctcacagctctcagaaaagggaagttcaaggacatgatcctggaagactctctgaccctaagtagaagtaagattttatcaaaaccactagtttgaaataggtgacaggcattgaggtgcagggatgtggggacaatttgaaagaaagaaaatatctataaaagccaaataaaataattccatcccccacctgcccatagaaatcacgtatcattactcctggagaaatgctttggtgtcagatgaatggtacagtcttgtctcagtgtcttacctctgtcctgggcccctacctcccctcctccttctgatcaccttcctactattctcactctcacccctaagtgatcatcaaagtttcacagacacatacatggttagagtgggaggagttgtttccaggccataatatccattcttttatgtaattaatagtagtatccaatcttggttgcacatttacatcccattgggcagctttacaaactttttgatacccaaggtgctttccatatcaattaaatcagattgtctatgggtgggaccaggtatatgtatttttttttcaggtacacatttttttttagactttcttaggtgattcgaatgtatagtaggggatgagaacttacgaattagaacatttccaacccagttgattcccgcaaaccaaattttcttctccctttgcaagagaagtatgtgactccacaagactgacctttgatcttggcaagaggagcacctatcctaagccatgcgatttagaggcccccactttggcctcccctggctgggctctgctccgtgagataaggaatccatgggccacggggcctgaccttgggagcccatgcctttatcctgcaccacactatgggtaccaaggccttaaaactgactatccaaatagctccgagctggcttccagggtttgtggggcctcttgcctgggggcagaaaacagtgatgctgtggatggatcccccaaatgctgttatttgtagggaagattgtgtgactcaagcctggacattgattttaactggatgtccatagtcatgagcacgaaattcctcaccatggagctgggatcggaggggagagggggaaggccttgggatgatagtggtggctgaggtcacagattaaccacttaggttggagaaatccaatcagaatctggccttcccagcttttacaaaggtatacgttataaaggtatacgtgttacaaaagaagaatggaaaatatttaagtttgtttgcttgacttataacacttaaatatttaagatatggtatttcagtccccatattgactctttgctgagctctggaaatgtcagcatctggcctgtgaccacccctgctctatctgtttctgtggcctaaactctgtgggtaggaggtgttggcctgatggatgcttcctaccttggcggcaccttcctcttgttacccacagagccctgagcaactgagatttcacctctggattcctttcactagctccgtgtcattttggctgtgagctgctcctgctcttgcatggttgcatatatagcattgtaacagtatacaaaatacatgggttttggtgccagatagacatgatttctagtcttagttctgccacttgccacttgcgtgactttaggtgacatccttgacctttctaaaccttggcttctttattatttatatttatatttgtaatcagagttagcaatacctacctggcatggtgttagaactaaatgaggaaacaaggaagcatggaaaagtgttggcacagtgcctagaggtagcaagaactcagtaaataattgtttccgtttatcaagtaagggcaattcatttaaaaacaataacaattctcctctacccctcttatttacattttctggactaaataattgatattttttgtttttctttttataatgcattttccaactcttagttctgcctgcttgtctctctctctctctctctatctctctctctctctctctctctgtgtgtgtgtgtgtgtttgtgtgtgtgtgtggagtacatccttcatatatcaaagtgacaactagcctactatcaggaggccaagcactttgagtttttatgaggagaaggctgttcatatttctttctttgacagtttatcttcttcttcacccaaccgtcacctgatctaggttttctacagtgagaccagtagaactgatatgtggatggagcctggtcatttggcctgggtgtactcagccagtggcactcagtatgtgctggtaaactgaggcaggactgactccagtctcaagaggttaaccatgacctattacaacctattgtagtgtttcaaaaacaggactgtatgctccttgttcaataccctttcctgggtgtactgggccacacatagtaagtgctaagttaatgcttatccgatgaaataatatgcaaatgataagttatataactggcccattttatgttaattaacaggcaagccacatgtttattggttgaatatgtaaatttttaaaaagtaagaataaattaaatgaatgaacaaatgaatgaatggtgaataagcatctgttgggtgggtgaggtgttatgctggggttgcttttatatttaactgctctatacactgaaagggtacaacttttcagtgtatcagtttccctgtctataaaataggtccatagtatctgcctaaacagggaaaaatgtttaataaaactaggtgctctagttgagtgctgggaattcttgggcattgctctcaatataagttgttgattagcagaagacctggctgtgtaaatactagctctgaaaaaggagagattttttattatttaaaattctccttagtcatccagcatttgtgtttgcttttttgcagggctgatatctgttttaacattttagcctgtgcatatacatggatggaataacattggctccaaatgaagacaagagcccatctcagttcaggcacgatcgtgcttgatggaaaagcatgtccttaaggctcatgcaatggccggaagctgctgtacagccctgactaaaaatgaaggtgctgatcttctggtttgtgcatgggcacagataccttagtactgctaagtcccgccaatctcaaataaagcagaatggagctggcaggccaaggcttagaattggagatggacagcaaggttctataaaagtaaacattgtggacagtttcttagacagtgatttcttagggtatctgttaagatactgtaacaaagaagcccccaaatatgtgacaacccaaaggtaacagcaatctaggatggggaggcatcagtgctcaaggcacctaggctagcgagtctcatgcactttcctccatgcagcttccatttttgagtctaacagctgctgttcttgttgctgattcccaggttgttgtaatgaaaaaaagcgatgcccagggaaagctctgccttaaggacatgatgctgaaattgcacacatcacgtcaacccatattccattgtcccaaactcagtcacatggccacacctagtggcaggggagctgggaaacaaaatcatcagctaggaggccatatgccctggtaaaattcataaaaggaagaaagaaaagtaaggctagcaggagacaatttaatatctctgctgtgggggatccattgcagaggacagatgtgttcatctttactaaaatgctttgtgtattttaatagttagaacactttggttacaaataatgagggaaagcaaagaggaagtattatgagggtgcatgtaaagcagcaagggagaaatcatagaaaaggcaagcctagcaggatcagaccccacaaagatcatgacagggagcggtttccatgtttatggctactcggggacccctgcagttggactttgttgatctgccacctcctgcactaaaatgatttggctataccgtcacatgtgttttttcagcccaactaactggtttgttctgcttattcctcttaatttatgcttgtatatgaactgccttgagctttactctcccttttagcaatatataatttctccctctatgccaaccagaaaatcatttcattgttttgagacaggctatacaggttctaggttactggccagactatggggtttgttcctttaaccgatactgtaggaaggacactgttctctgaaaggaagcagggggagaaggtatggtgtcctcttttatatactcactcctcattccactcaaagtgtgatctaaagaccaatagcatcagcatcacctgggagtttgttagaaattcagaatctcaggctacacctcaagcccactgtattagtttcctagagctgccataacagcgtgccataaactgggtggcttaaacaatggaaatgtattgtctcatggctctagaggccagaagtctgagatcaaggtgttagctgggttggttccatctattgtctctgagggagaatgtgttccttgcagctcttctagtttctggtggttaattggcagtctttacgtcccttggcttatagatgcatcaccctgatctctgccttcaagttcacatggtgcactccctgtgtgcaggtgccttctcacatgccgttatttatcaaaacactggccatattggattaagggcccagtctacgccagtgtgacttcatattaacctaatcatctacaatgatgccatcttcaaataaggtcacattctgaagtcctggggggtgagtactttaacatataaatttgtggggaaggggtacaattcaatccataaaaacctctgaatcagaacctgtacttatataggtaatttgtatgcacattaaagtttgagaagccatgccttaacattcttcaaaaaataatgtgccaccaacacacttactaccacctttaatgtgtaatggaaagcagcctagtcttgggttctggattctgaacctaccctagccacgtcacgtttagtgcacagccatgtgccaggctcatattcagcactcagtaaacacttattggatgagtgaaaaaagtgggacaaagtgctttcatgtctaaaattggaatagttatttcaaaagaatattgtaaggactatcagatttaccaaatatttaaaaatggaaagcatgactgtatcagtcagaatccagtcaggagacagacatgcaattcatttgaacagagaaattagtatctattagaggagagtaattataaaggtataaaaagaactctaaataagaccttagaacttagggagattatttaaggaagggacaaattttaaatgaagggaccttctctccaaagcttgaattcagacttcactggagaaggtatagtttcctcgcactggatggtaaacacgttttatgggttggcctgtatgctccagggtataggctgcacaatgctggtgagggggatcagagggaagcaaggtgccaggaacctgctgcctgtcaagggaaggcctagggtgcatggcgtctgcatcaggaggtctgcagttacatggatactggactgcagacagagccctgagctcacctagggaatgtacacaacactggatgcccctacagtataccactagtagcctgcaataggaagatgtgaaaagaagagcagtacaccagaaccgggaagaaaagactcttcttctctcccgctccaacaccctctactgacataatttaatgtcatgcctgttgcaacaaagaaatgctaaaggatccattccactattgcacaacaagtaattaagggcagactttgtagctgggaggtaatagattgatgagtggcacatgcactgtgccaatataaagtcgttttctcaatgctaatatcaaatatggcctcagagaataagagaaataaaaaatgtggaattcttaatgccttatccgatagataagtagttagttctccctagcctttctctaattcccatacatacactgcttttttccaactgtgttgcctcataatatgatttggaggggtgagataatattgaaaatggaagttgttactaaacttgggaactgagcataccttgatgatggtgctcacctatgtatactcttgtgttatgatacccgcagcacagcagtgccaggcactcaccctgactcctagttatctaagacgtcatcctctggggctaccttccttgggctgtttttccaagactctggaccatttatgccataattgagctcatttacacaatcctaggccatctcattcttgcccatggctttcattactcatgaacacattcctctgaccgggttgctattctgagttcctaacgatagtctccttgaagccaatcttgaaggtcacaaagacaccccaaactcaacatattcaaatcaagctcatttattatcaccacattcacccccagtctgttatttttttctctttctcaaagaatggcaacttatgtttatgttatctttctctcttttcctttaccttccatatcacttccatgtcagagttcctggatcttatcccctaaatacctcttgattttgttcacatctctctgtctacattagcaccacccacatgtgtactacatcacatatgacctggaccaccatacagcctcccaactgatttattagcaacccctctggcctttttcctaatatgaatctaatatcaccctcaccttcacttctctcccactgcttcatatttttcaatgtttcttcattgctgttaggacaaacacaaaactcttgacatgactttcaaagtcctgcatggtctagctcttctccacctctcaagactgacttcacctctggccttctcttgatttctctggatcagctacactggcttttttcaacccactctttcgggatataggacctttgcgtatgctcttccctgtgcctggaatactcttcagatcccacctcaaccattccctgatcactctatccagctcaaatgcccccattatcagctcccattgcaccttaggaactgcttctccctgatagcacttttcagagtcaaatgttatattttttcattaattgtttggtcaatgcctatttctagactgtaggatctactttggcaggatacgcattaataattcctcactattgtattctcagtgtctagcccaatgccttttatttaggcaaaataaggaatctaaatattggaattcatgtgctaaaatttcttgctgaaatttactctctccttcaacaaatatttagtgagcacctacatgtgtttgcttctatatttggaactgtgcttccaaataagattcctgctctctcatgttgtattagtttgggttgtctagagggataggactaatcggataaatgtatatatgaaagggagtttattaaggagtactgactcacatgatcacaaggtgaagtcccacgataggctgtctgcaagctgaggagcaaggaatccagtctgagtcaaacctcaaaagtagggaagccaacagttcagccttcagtctgtggcctaaggcccaagagcctcggcaagccactggtttagttgtaggtctaatagttcaaaggctgaagaacttggagttcaatgttcgagggcaggaagcatccagcacaggagaaagatggaggccagaagactcagccagtcttatccttccacattcctctgcctgcttttatcctagctgtgctggcagctgactagatggtgtccacccagattgagggtgggtctgcctctcctaatccactgactcaaatgttaatcccctttggcaacaccttcacagatacatccaggaacaatactttgcatccaatgaagttgacaatattaaccatcacaagtccactccttgtcaccttaaacccatacacatcttttgaaatcatacataatcttcaaataaagacaataataaggtcataattatgcctaacataatatagctatcctttgtactaccagaaactaccaattcccaacccaaatgctattagataaatttaacaacactgaaatgctgatatgaagtcaataaatcttatgtcacatgacaaaggaaaaagaaataaaatgaagatattttcttagtacaagtgtatacaagctgaaacatgttcataacaaaatagagaggaaatacgacaattaccatctttgtttctgcaactggtcacgtgtcatagctggtattgatgactaccttcttctactacctattctgtattccttttgccttcagcaatctcctcagcaggtcgtggtttttttacctggtggagtgacacaaaccttcattcctgtagggtctatgtcatttgtagtcctgcctggattgggttgttatagttttccattgaccttaatcacagggcatgataatactaagagatgccctaagggatctcctatattccatgcatactcttctttacctccactgtggagtagtaaactgattttatcttgataatctgggtcaatcaccccagccaaccctataacttcctttcttcctttgttgcctgttgacttagaggtagggggagcccaaagtggccaagtggcaatcttaacttccagtttaatagaatcgttgttgtgtcttctggtgatggtgagaaatgacgcttccatttccatcccttgattcctggaaccatgaatcctggctatgggagaaacagtaccatatattggatgctgattcagatcatacacagccttctagagaactttgtcccagccctgcaaagtattgtcacctagttggcattgtaatttgacttcaaaaggccattttaccattctatcagtccagctgctttagggtgatggggaacatggtgagaccagtgggtttcatgagcacaagcccactgctgcacttctttagctctaaagtgagtgccttggtcagaggcaatgctatgtggaataccatgatggtggataaggcattatgtgagtccatggatggtagtctcggcagaagcatttcatgcaggataggcaaatccatatctggagtaagtcgattccggtgaggacaaattgctgccctttccatgatggaagaagtctagtatactcaacctgccaccaagtagctggttgattacccaaggaatgttgccatattgagggctcagtgttggtctctgctgccagcaaattgggcactcagtggtggtcatagccaggtcagccttggtgagtggaagtccgtgttgctgagcccatgcataacctccatctctgttaccatggccacttttttcatgggcccactgggcaatgacaggggtgactggggaaagagactgagtggtgcacatagaacaagtcatcctttccacttgattattaaaatcctcctctggctatggtcaccctttggtgaacacgcacatgagatacaaatatcttcacagtttttgaccactcagcgaggtccatctatatacctcttccccaaatttctttgtcaccaattttccaataatgctttttccaaattcctgaacatccagtcaaaccattggctatagcccatgaatgagtatataatcacacatctgtccatttctccttccaagcaaagtgcacaacaaggtgcaatgctcaaagttctgcccactgggaagatttctcttcaccactgtccttcagcaatgccctagaaaggggctgtagtgctgcagctgtccactttcaggtggtgcctgcatattgcacaaagcctgtgtaaatcaggcccttgtcaccttttcctctgtcaactgatcatagggaaatatccatgaggccatcagtgcaggctgggggagagaagacaaggtggcaggagtggggaccatgggcatctgagccatttcctcatgtaacttacttgtgccccaaggacctgttcaagcctgttcacgtacatacatatcatttacatttgatgatggaatggtgctgtacattcccccactttatggctagatgggtcagaaagcacttggttcatgataggcagttcaggtcacatggtgacttgatgacctatagttgaacgttcagtttctaacaaagcccagtaacaggccaagagctgtctctcaaaaaggagattagttatctgcagaagatgacagggccttgttccaaaatcctagaggcctctgctgtgattcacctatgggggcctgccaaaggctccaaactgcatccctatttgccactgacacctcagacaccattggatcttgatgggtcacatggctcaagtggcagagcagcttgcacagcagtgtggacctgttgcagagccttctcctgttctggaccccactcaaaactggcagcctttcaggtcactcgaaaaatgggccagagtaatacacccaaatgaggaatgtgttgcctccaaaatccaaatagacccacttagcattgtgcctttttcttggttgtaggaggggccaaatgcagcaacttatccttctccttagaaggaatatcttgataggccccacaacactgtactcctagaaattttactgaagtagaaggtccctgaattttagttggctttattttccatcctctggcacacaaatgtctcaacaataagtccagtgtatttgctacttctcactcactggatccaatcagcgtaatatcatcaatgtaatggaccagtatgatatcttgtggaagggaaaagcgatcaagatctttgtgaacaagatcatgatacaatgccagagagttgatgtacccctgaggtaggacagagaaggtatattgctggtcttgacagctgaaggcagattgcttctggtgggccttatgaaaaggaatggcatttgccgaatcagtggctgcataccagttaccaagagatgtgttaatttgctcaagcaatgaaaccacatctggtacagcagatgcagttggagtcaccacttggttaaacttatgataatccactgtcattctccaagatccatctgtcttctgcacaggccaaataggagagatgaacaggaatgtggtgggaatcaccacctccatgtctttcaagtttttttttgtttttttgttttttttgagacggagtctcgctctgtcgcccaggctggagtgcagtggcatgatctcagctcactgcaggctctgcctcccaggttcacgccattctcctgcctcagcctcccgaatagctgggactacaggcacccgccaccacaccgggctaattttttgtatttttagtagagaagggatttcaccgtgttagccaggatggtctagatctcctgacctcgtgatccgcccacgacagcctcccaaaatgctgggattacaggtgtgagccactgtgcccggccaagaatcaccacctttgcatatttcaagtccttgatgatggcactgatctctgcaatccctccagagatgcaatattgtttttgatttactatctttctaggtagaggcagctctaatggcttccatttggcctttccctccatactagccgtcatcttaccagtcaggtagccaatgtgggggttctgccagctgttaagtatgtctatgccaattatgcattctggcactggagaagtgaccacaggatgagtctggggactcactggacccactgtaagttggacctgagctaaaacttcattaattacttgacaaacataagaccccactttaattggagaactataatgatgttttgtgtcccttggaatcaacatcagctcaaagccagggtccagtagtccccgaaagttctgatcatttccctttccccagtgcacagttaccctggtaaaaggctggagatctccttgggcaaggatgggagaaagattaacagcataaattatcaatagtatagtggggtctttcctcaaggggacccagtctctccttcattcaaggggttctgggtttgtaaactggttcaagtctggaaattgattgagacaccatgattctctatttttataattcaaattagttttttgttcactcgacctggcagttttctgcctatataaattaaataagtatgcaataagcttgctgtcaatttcagttctaggaacactgtgattaattagacaatgccagagctctacatgagtcagactattctgattgctgctttgcatctgctgtccattacggtaactatgcccaccttgcctttgacagttgagtgctgccatttggcctctgccacctcaggatctaactattcctgttgcatttaaattttgtagttgagtgactgcggttcctcttgtaagatctgccatacagagaagagcaatcacagagcccttcaaggatgcaggtcctgctctcacatatctattttgcaaagtattgttaaagggtatatcttctggaccctcccagctaagatgagtaagtctaaattgactcgtctatcccaacatcccaatctccctaagccttttgatcccttcctctacattaaaccaatggagagcaggcatttgcagcttgctcacagtggcttttgatctgtatttcagctaaccaagcaaataaacgattagaccatttttttaactctccaagctgcaacattaaatgcagaatccctgcttagtggacccaaatcaataaattcagcctgatccaactttatgttccttccatcattatcccatacccttaatatccattcccatgcctgttttccagttttctgcttacataaattagaaaactcaaggagttattttggagtgtagtgcacttcctcatgggttacactctcaacctcacttctaggggcttgccaggactttagttataggtctagaagcaaacaggtttggggtgggtcctaaggagaatcagcattgtcttgcctagcaactgcctcaggggaggccatcactgttgtctcaggcagtacaggattaatctctgacaaaggtggaaaggctgatggcagcatgggtggggaaggagatgttgccaccactgggggtgggaaggctgtttcctctggcagaagagacttttcagaatttaggagttcggtgcccacagcctcatcagggtcctcccacacatccccattccaagttgcagggtcccattcttttccaatcaatgccctcactttaatagtagacacctattgaggctacctgtgcaccttttttcaggtcagccactcacatgtcaagagcttgtgtctgattttccacaatttcagctctttctctacaggagataagactcagggtaatcttggaagatttgaggctcagtatgtgcttctgaagctgggagctagaatccccgagttcatcattttctttcatcactttgtctagtgaactaggcaaccaacttcattatattccttggttctccacgtatggtcaaaggtattatgtatagagtcactgtattctttgccactcacaaatggtgaatcaggagtatcaaatgaatttattttgcataactgtctaaacagttcatgccaaggactatcagtgttctccatgctattagaagtagagtccttagcattttttgtctaatcatattaagcagccaactccagaagcccccaaatcaactaaagaactccatccttaaaattctgttcctctagaaccactcttggtgacaacatctgtgttagtctgggttctctagagatacaggactaataggataaatgtatatatgaaagggagtttattaaggcatattggctcacacaatcacaaggtagattcccacagtaggccatctgcaagctgaggagcaaagaagccagtacaagtcacaaaacctcaaaagtagggaagcagacagtgcagcccttagtctgtaaccaaagcccaagagcccctggtaaaccactggtttaggtgcaggtccaagtgtccaaaagctgaagaacttggagtccaatgtttgagggcaggaagcatccagctcaagagaaagatggaggccagaagactcagtcagtctagtccttccacattcctctgcctgcttttatcctagctgtgctggcagctaattaaatgttgggtctgcctctcccagtccactgactcaagtattaatctcctttggcaataccctcacagacacactgaggaacaatactttgcctccttcaatccaatcaagttgacactcaacattaatcatcacacataccatgctcattctgatggggaaggacaaaaacaaaacaaaaaacacccacacatacatgagaaaaattgcagatcacaataggctcaatgaagaaaatcaaatagggtggtgtgatagaaaataaggattagattgaaaatggcctcaggagaagagttggattgcccaagtaggcctctctgaggcattgcatttgagctggatttttatggcgaaaaagccagctatgtgcagttgaggacagaggtttccaggcagaagcagtagtgagtgaaaaagccctacagtggtaaggagctatctgtgtcagagaaaatgagaaaaactttaacatgccattattcatagggttaacaagggcaaggcgttgacccaaaggcatgacatctgagcaccactgcatgtgtgattagaaggtgccttagaaaaccagttattcaaagggagaaggagcatgatcacttcggttaggacagtttgctgtgcaggagcattatcatactgcaaaatgcttgtcaatactgtttacatagaatacaacctgaatggtattcctggtattattcctggtgttattcctggaaattctgcctgcttcccaccgctaaatgtcaatagatccccccagacaccatttatcggaaaataccaacctctccctcaccagcatacacacttttctacatgtcaatcaggggtggtagtgatcttgattagaatgactggaaccttttcagtttacagatgtggaaatggaggcccagtaaaggaaagcaaataaatggcacagcttgggttttcttttctgactcaatacctggtacttattttactacagcacagctagcacccatatttttacctccaatcatagttggttttggcagatggaaagcaagcaaaccaaaaccacaaaaatgctgtgtaaaaagaatattttcctaatattcctctttgatacattcagatttctatggatgacattttcttttaatggtctttatctgtgttttgagggagggtaaacttgaaagcccgccttctgttcaatgctgccccagacaaataagtttgatttaatgcaataaacattcttccattgctcactgcagccggatgttgtttataatgtttcatctgccaaagcacattgtatattatcattcagatgcaaaataatttatggctttaactccctatgcatttagatgagtaaatcacttgatatttagaagaaatgattgttgtttaattttttgcttcacttaactttttagatatcaatacaactttgacttcatgtttgttttcgattaacctcgcgattaaacgtaagaagaagtgtgtgctcttgggtgtgtgtgtgtgtgtgtgtgtgtgtaagcattgtatggggcatctttggggagatcttaaatcataacaagtcatcaacttgtgagcttgtgccttgttttttgaacaactaaaagtcattctgaacaaattatgttgaatgagatggataataaaattggattttaccattgtaggctataataataataataataataaccacaaaacatgttatcttttaaaagtaatttaaaaggaaattatgcaaaaaaaacctaactgatgacagcatcataagaaaagtgtgagttcttcagtgtgatacatttgaaggagacaatgctcatttgtatttgtacattctgtatatttattaggaaatcaatcttattaattttagcatgtcattgacagacagatgcatatttatttttgtttatacatttatatattcattaagtgtgataaagaaataataataatactaacattaagcttgtattatgcaccatcacagtgcttagggctttgatggcattctcatattgcttcacagtggtaagagtataaatgatggaatcatagctttatagtggcagaatagttttgatgaattgaagcatgtttgaatcaggggccaactagaaggaacagtagtattgatgaaatataattttaatactgtgagtttcataccaagacttaaactggtctgaaaatgtgtggtcaaggagagccattttgaccacctgcttgagtggataggatttagtgtgcaatgaactccccaatggattggggtatatccagagtgcttgaagaatgtgtgcctgtcttttctatactttagtttgttttatataccctcctaatagacagtgaaaagacaaaccttggctcagtcattttaatttagtaacaattgagttcattttgtttaaaggcttatgtaatttcttcgctaatgcaatttttaaaatttccaatgattggctttatctcacatatttaaaagatgtgcaagaaacatcctatgcttaaacatcctatcagcacatcctaaagtcagtttcccatagcatagttcttctgtatgctagtatattggcactgctatttgctgtgtaataaattatcccaaaactcaatggtttaaaacaacagggtttattatctcctggttctgtgagttgtgaattcaagtatggcttagctgcatctctcatgtaaggtgtctcacaaggctgcaagtcagctggggctacaggaatcttaaagcttcactcagagaagatccactccaagttaatttgtgtggttattggcaggattttgtctcttactggctgttggccagaagtcaccctcagttccttgccaaatgggctgctctgtaggtcagctcgcaacatggtatatagcttcatcagactgagcgagtcagagggcaagagagggagtagtaacaagagggaagtcactgtcttttgtaatgtaatctcagaagtgacaccccatcacttttgccattctgttgattagaagctaattactaagtccagcccacactcaggaaaaggaattgcaaaaaagcatgaataccaggaggtggggatcactgggagacatttcagaaactctctgtggcaggtagtaatgttatgagggtttaatgttctaaaagattgtgaaatgtcaggtttatcacaggacctttcagagtcttgagcatgctaactgcattgcaaattgtaagtggaaagggtctatggaatggagtgtttctcaatcctgtttgttcggtgagtcctttttgttaaagagcggcatgttaaatgatcctttctcaaaacctttggtgaatggctgcctaccattttcacttgacacagaagttactgagaatatgagaggtgcattgccattggctgcagaacctgggccagtgcacttatcctgaagctgttaggttctttgcatcttattagattgacacatggtttatttatgccaccatgatcatgatttccactgggtcatctcttacatcagctgctggcaacataagccatataagtaaaaaagagtgtaagagttgatgttgaacacatttatgaaatgtctgtgagccaattgttgtggagattagcttccagctggtgctctcctttctccctttgtggatggcaaagccagactgtggccaactctgccacttctgtccttagtccaaccccaccccacccccatcctatgggaattggaaagccaccagtatccatcattatcttcttcactctggaaataaagatgttggagccttcatacatcactctaaaaaactgtcaactcctagagacacattgccttattgattttactttatttctcatgtctctcctttaaaaatgaacaataaattgcagcagctcatgtatagaaggactccattgctatttaacttcttgtttggatctttaatggcccatgtgatttgtccttctcagacagatatcatggccttgatatcacgaactgtagcatgcatgtctgcatgtccctccccagtacagcagagttcagtgccctggacacttttctaaataggctctgggtgtttggtggattgagtagattgtcacggcaggtggggcataagcatggttattattagctcatagttaaatgtcagaacacattaacaatgtttgtttgtattttagcctgataattattcttttttctcatttcctgccacttgtaaatattattttgcacatttccagtggggaggcctggagagaagattttgatcgttcatacctctttgatgccaagcccacttctttatagttcttatgagttaaattaaatcaggttttttattgtgtctacatctatgtttatgtatttttgtctctctgcacatccacacttttttcttatttatgtctcctacaatttcatgagatagtctttcagcaaaacaaaagtcaccaggaagtctcactaatcaactcaccagaaatctgcaaaagaagggttcctgctggaatattgcctcagtactaatctatgggtggttgatgcatctagaacttacactggatagcatattaaacaccttggtgaattatggtgcttgctccagctgcttttaaaaaattatttattcattgatgacttttgaaggtgagcagatgtttccatttgctcattttggtttatggcccattctgcaattggtattgtagtacacacatttctatgtaatatatatctcatatggtccaatgcattagaaaaagagagaaacttataataaaaacatgggatcactggcagcaaacagtatgcctggagctcgtggtgacttcagcattatcagaatgttgatagcattacatctgttgtgtctgaaaagtgccagaaaatggtgctaatttataacgtaggaggagggaggtgaagaaagatatggtgatgaaaaatagtacacagtagaagatagtcaactaaatagtaatttgttaagttttattcacactatataacaaagtgctgtcacaggtttctggtttggtttataaatcaactacgtatgttgctcatctatacttcccgtggaaacggctattctaaatagggcctttccttttttacagaaaacatgtttgtatttctaagggttgtgtggttcagcccaagaacgagggcagtaatagaataaagtaaggccttgggctaccattgaactttacaaggcaaagggcagagaataggcagaaaaacagagggaaattggaaccagcaacatccgtagaggaagaacagagagaaagaggggcagatggttgggaatgatagtgagaatgatgcttatagttatcacagatgcctctcaatttttaaaaccttgaatgtctacatctctgagaaatttaaacactaaaaaaaaaaaaaatgcttttttctatccctcatttccactccttttatcctcaccttacaaccatatgtatcttttttttcttcctaagattccattgctaaggttgtagatgtataggttagacagagtatgttcccaagacatcagaacaaagtttacaggatgtcctggtgtagccagaaggacagagaagtttgtacctgcctgtgtggaatgtttacaagatcccgagtaaagccagtgcccccaacctattgtttctccattactggctgctctttgaagacaatattttcgaatttcatctgttatttcaaggttttatctatgctaaaatgcatattgaatatttgaagctgacatcagtcacatgtatccttctagtctagagggaatgttttaggttgtctcatgagactgaattttgataagaaaatgtgaatgtgaagatccttgcaagggagaaaagttacaaaataagaagattttttagtttttctttttctttttaagcaaattcctctgcccattttgtgacagtgttttaagaccagatgggagtgtccctggatcctttcagctggtggcactgtatgagttttctattgctgctgtaacaaattacaacaaacttagaggcttgaaacaacaaaaatttattatctgatagtctggagattagaagtccaatatggtctcaatggactaaaataaagatgtggacagggctgcattccttcttgagcctctagaaaatccatttccttgccttgtacaacttctagaggccacccaattccttggctcacagcccctttccatcttcaaagcctgtgacagtaagacaagtccttctcatactgttgtctatcctgttcacagcagctaggaaaggttctccactatcaaagactcatgatttacattgggaccacttggatagtcgaggtaacctccccgtctcaagatctttaattgtgtctgaaaaggtctttttgccatgtaaggcaacacatttgcagggtcctgagattaggatgtggatatctttgggggagtgcctaccataagcactaactaaaacaaactctttccaacctactgtgtcctgtgcaggtggtcactttttttttttttttttttttttttttgagacagagccttactctgtcaccagactggagtacagtggcatgatctcagctcactgcaacctcccatctccaggtttaagcacttctcctgcctcagccttccgagtagctgggattacaggcacctgccacctcacctggctaattttttgtatttttagtagagacgaggtttcaccatgttggcctggctggtctcaaactcctggcctcaggtgatccacctgccttggccttccaaagtgctgggattacaggcatgagccactgcacctggcctggtggtgtttttaataagctgcctcagttaacaagagtactgggcctggtcagaaatttctgccaatgctgagtgctgattctcttctgatattaattgaagtcagtgtcttgtcagcctccacttctcaactctagctgagctagccacaagagaagttggagtcacatctttgattccttctccatgcttacaaaatcttgtatcccattcttccctgcagcatgggatcctgagactttggcagccatcgtcaaagtttgccctccacaggacagtagcattgagttcctagtagccttcaggatcacattgtctaagcctattattttcctaagggagcaaagaggagctcagggaaggaaaataaattagcaaagatgtagaacctagacctacacagacttccaggcccatgcctgggccgcctatgtggcgttgttccacctcacaataccagactagaggtgactagacaaggtcctcaaccagttaaaaaaaaaacaaaacaaaaacacacacacacacaataaaacaaaaaaatatttccccataagaaaatgttccaggtagaagtgtaataatgtcaaatatttaggaagcatttgtactaacaaggataaatcagagagttttgttgtgtgtgtgtttaatcctcagttaatcagaagatgttaaaatgggagcattccttcatgaaaagcatacacttaactaagactttgaggtcagaggaaacatgaatggggaaatccatgaaaaaaaaatctaattactgatgcctttaaggtctggttttagagattcaatgtgtgcacacatagaaactgaatctctaaaactagaccttaaagccatcagtatcatgattaataggggttaatgaggttaacccctattaaccttaacagggaaggctttggttcaaaagcctgaaggagacccagagccagcaaatgtgacatggggttttactaggggctgattacaggggagagagtccagtggtggtgggctggagaggaaaaccatcttacctgcagaagtggtccagtggtggcaggctggaccagataaccgcatcgctcagtggcagtggcctgggcaggaaaacttcaaccacctgcaaacagcatgcggtttgtatagcattttcagttaacactttccccgtaatgaactccacctggcaaccttcatttaccccaaaactcagggcctcagtcctctgtatggcccatgttccacaggatgggccgggggttcagatgtttattatatataagaaacaaatctcagggttggccactcccagaatctgtagctcaaaacacacattgaggtgcatctgccatacagggttattctaagggtatgctgaaatcattgctatcaggtgcatttacccttctatgtggccccttggtttgactactgaggtcagttgcaaaaggtaatatcctggcttctatggtttctggcctaaatacagtcccatattaaactcctgtttgagtattttgtgaagtctcttcaacttagaatgccatctcttatggtttcttaatttctaaattatagggattccttttgcaacagcaatgtccatctctgaggcagctggctgttcagtcgttgctgttgattattctttatcctatgagctgtcctgggaggagacgagacagctgatttccatgatctgaagtgcaacttgttccaccgcctttaaaataggctgcagctgttctagtgttttgaccgctagggtcttatatgtatggtgaccttaaacttcctcagtgaaatgttctctatcatagtcatattttacactattcaaaaagttaaatcagacagcattttcctggactactttgccaggagatgaccacttttgtgctttccttgtctgaggaaatttgcaatttgccaatattttaaaagggaagacaaagccataagacagaatagtaggagatatgaaactagcttagggaaaaaaacaaactttggtaagattttactcacacttcctatcagtattccaacaaaccccagcatgaattaagtcttctcttccttattggctgtctttatttactatctctctttcttccaagaagtatttattcagtacttgctgtgtgccagaagtggtactaaggactagttaagatgtaatccctgcaaatcctgtcaggagattgacttcaatttagatgagcaagtgagtctcacttcttcccattcagatgccctttttcttcccttcttcacctttttcttcactcctcactggtttccaactggaaatcaagtaatctcagtatatactcaacttcagatgtagtctcttgagtcatcttaaagttgagactgagagagcaagtgctgtttagagaaacttgaaaatatgaagagtaacaaaaaacattatttgagaagtaaaaatgcctaatatatctctgtagggaagagtgagttattacgtatatatttcaacactgcagtgtaaatgatggtgactacatggatactgattaaggcatttcatctacaaacagtacttagttcagtttactgaaaacaactcagagtttagggtgtggttaaagataaccaaacatggacatcttttacttctccaggtttagacataaagctaagacataaggaaatcctgattaattggctagtcatgacccattctagaaagtagaattattcagagcattaggacccagtgaaaggtcctaccataattcaaactgattagtgaattttctctaaaattatacattgaaaatatgggatttttcatcttcaaaaagagtttgaggtctgcagtggtgaatattcatggaatcacagaattgcagacataactttggaggaactctgatctaaccatctcattttcacactgataaggaaaattatttattttatagataggtagaagaaatgttaaacaactatcaaatgtaatctaactacgtacaggcaagactgaagttagaaactaggacacctttcttctaattcaaagttgttttcactctatcgcaagccttaccttagccaaaaccaccatacgattgtctgtaaagaagactctattgcccagtggtcatgatgatttaactcctttctgttttcctttcttcttgatttcttgtcttcccttttagtatttattcatcttctctctgattaatgagaatagtaaaataaatcttaaaatgggctaatctgtaaaacttttctttttttttctttttattttttgacagagtcttgctcttgtcacccaggctagagtgtaagggcacaatcttggctcactgcaacctctgcctcatgggttcaagcgattctcctgcctcagcctcccgagtagctagggttacggcactagccacattttttgtatttttagtagagatggggtttcgccacattggccaggctggtctcgaactcctgaacttgtgatccacccgcctcggcctcccaaagtgatgggattacaggcgcgagccaccgcacccgtgcactaatctgtaaacttttcaaagaatccaactctttgttaccctcagaaatataatctactcagtcatgcatctactcagtcccaccatactgagaatgatgaaactactatgatgcgtattttgggagtgtgtatagtggtgtgtgtgtgtgagtgattgtaagtgtgtaaggtgtatacaggattgtaggtcattgatgattgaggaacttcatattgaaattactgtccctcaattctcagtgactaaccttcagctttgttttgtttatatgctttcatattcataaaatgagcagatttttaaaaacccttgacctttatcttataaaccttagtgtttttagtaataatagttcattggtaactatcaactgaatgttcattcatatcaaccaatgagaaatattagttcttaattatttcttgttcctttgtccctttccacttacatgtacatcaagtgtttggtgtgattcatgagaccatgggcatagtcttgggttagtgaaaggtaaagtaggtgtaatagaagcaagcttgaaatggcaatcggtatatttgggttctggtcgtgggaagtcattgacgataaaatgtgtcttttattgagcacttgtgtaagtcaggcatgtatgcattctcactgacctgtgagattggaattattcccttctccattttacagatgcagaaattgaggctgaaagatagtaagttgccttcacagaactaataagaaaagagatgggattcatagattttctgtctgtaaatcccaggccagcatctctgctgggcagtgctgctttcttgctctgtgtttttagaaaaatcacttggcttttctgggtcttgggttttctcattaatcaattggtggtttgagctcttatcatgtgtaacattccttagagctccaggaattagagaaggtcattttcttttcctcctccacctctcacccctttgacatttacttttcccatatccagctgttaatcattaaaaatgaagatgatactgaaagtcatgtctggccatgaggacaggatctgaatgttttcattctgacctctaaatcagtctgcatatcttgcctgtaaaacaaaatcaaaaggtgtggtggggagggaccagggactttaattatatttttaaacaatggatttccattaaaattgtattattctacacctctggaaaattacattgtagatgagataaatgcagcttggcatttaaattaaggttatctttagactggtaatctcatttgctgtttagcaattttaattcaagtcaaggcagtgtaattagtgccctcagccaattgccatttctcaccgctttgtagctgtatttactactgttaagacacattctatttgtgtggaaagtataagtcaacatactaaattattaaaggtggcatacatcaggaaatactccctgcacatgctgatgcttcagattaggaggctttaagccgtcatgccaagagagcagtgataccgtggatggtaaatgcaggacatcaccattttttaaatacagagaaattaatgtgagatgttcttagggcaactatactaagtttagcagtgcttcaacatgttttcaatttgagacaagcttagcataatttaacttcaaaattatattttacatgatgtgatagtttttttttttacactaaggtatgcaggtgtgtggtgggggatagggagtgatgtgtgggtgtatgactcaatgtctgtatatatagtttctattatagcttaaaaccagacccaggcaaatatctctaggtagtaaaaaaagattaggtaataaggagttctattatacccttgaggagacaggcgattttttatttatttgaggaaaaatacccgtgtgtcactatacatacttattaatattaattatataaattaattctattaatatattatatatttgcaattgatgaatcatgctatatacatctgtgtttttgtgtgtgtatatacatttatgtatgtgtgtgtgtgtatgtgtgtatatatatacacacaggctttatttgactttagattcctgctttgaagaacaagcgatattcagaattcaaattcaaacataaattcaaaccttttcttccttctgcctaataatggctttaatgaaaaaaatctataatttagtttgcttcgtgtattttaatttccttgagaacaagagctttatctagttttcattccttgcagcaactagcggacctttacttaaagactcttagtaaatgtttgttgaactcaattatgtaaaggaacagttgactgttcttgatgacagctttctaatgtatgagtattctcttggttttatagtctatatattgaattccgtatgcctgcctcttttctgtactccaataggactataagcatgtttacagacagacaaatctgttgcccatttgaagaaaagtataccactcagaacatttctggagaaatattagcattgtaaatttgattttcatgcctggggaaaaaaaatcaaactgcacagagaacatattcatgtgatattttggtttgtgaatcttgatttaacatatttgaaaggtaaaataaacaattccatgtgagcaagaatagaactgtttattttgacaaatcgagtccaagtttacaatcttagtcctcactccaatcttaatccttagtccttctgattgacccttaatgacttctagagataatcggatttaatcatccatccaagcccatggtggaaaaccaaaacatcttttttttttttttttttagaatagaagcaatatgatttaggacattaaaaatgcaaagcaattcagaaagattcttgcttttgaaaacaaacaagtagaaaacctatgtgtttttgcttcctgatattcatggaatgacatgaaagacattgctcattatcttgctagccacttgatattgcatatgccagatgcagtggctcacacctgtaatcccagaattttgggaggtgaggcaggaggatcacttgagggcaagaaattgagaagtagtgttgcattgggaaccgcaggtcacaaaccaaactgtagaaaagacaaggtccacatcttttaatagccagagctctctatagtcctgagacagtggatttgcatcactatcaaacagtaaatgaaaaataccattatattaaaaatagataagtgatattttgcttacgtggcagggtagtgaaattatgtctttgaatgtgtcattttacctgacctaacatctttttttgtaaaatgcatgtaattatagatttttcttactgggagactgtaaaaaacatatacccaaattaagttaataaagcacaacaatcaccctttgttgctgcctggggacagctaggtcctaaggttgggtctcatagctttcatctgttagttcagctcttcctagtgtctgagactgatcctattcctagttataggatattaaatgcattgccagccatcatttcagctttggcaaacatgagcaaactatgctatttcctgtgaccttgtgcccctacctcgtaactttcagcgtccatgtcctaccttatctgtagtcacagaaacttgcatgtcacaactaaggccctattttaatctcttggcactgcacagattttatagaaaatgaattcctattttgctttacccataccaactcagcagtggaactattgccaattttcaacaaccctaaatgcctactatcttctgctttgatttccctttttattggataattttgagtttcctgctgaaaagttttacctagctgctggaatggccaatgattacttcttcctggacttctatgaagccgttctctacactttggcccaagtcatcaccatctgtctctgaactactacaataattttctgttctctcgtttgccagccaccccaatacgaaagatcactttaaaaagtaaattggatcatgcagcatctctgctcaaaactactccagtggctttccagtgcattaaacagttctttaatgtgattcttgaagtccctgcttaatcttgcctgtgcccaatcctccaaagccattctgtctcttattcactgactgcttttaatcttcaaacccgctgccctttttctttctgtatattgcatgcacgtactattttccatctcttgcctcctttcccctctaagctcttaaaggtaatacctacccatctttcaggtctctgtgaatatgttatttccttggtacactctgttattttcccaatgagatctctattcagagcacttttcacaatctgtagtcaattatttatgttgtcttacttgcttaatggctgcttagatagtaggatctgtgaaggcagggctcagactcacatcgttcaccactggatacccaaatcttagcaaattgattcacttgtagagtaggttggtttgtggacttcatgtttaaactattaaatgaacagattgtctgcttggattataatgtatcgcttctttccctactctactaagaataattattgtttattgcagtcacatcttatgtaccaagaaatcagcatgaattacctcaaatccttacagtctcaatataaggcagatgttattattcccatcttacaagaatggagatgataaacatgtagtgatttgtgccaagtcataaaactagtcatgatgaagccagaattatgttccgaatctttttgactcccaagtctgtgctctcccacctcagaacattcattttctactgcccaaacttctccatcctctctacagataactactgtagagccatcaccaagtgccaacctgacccttgatgtgtgtgtcagcctttctcggtccagtcaggctcaccttcagtctctcacactgatgtggaattatcttcatgtagacaagtctcagtaattgagtcataagctagtatccatacttgctttttgtagcctagagatgtttgtttggttaggcagagcccaagcattccctacttgagtggtagctactacctaaattatttggtctagagcttgggagaaaataagttcccaacttacaatgtgaatagactcatggacatcccacttccccatgtatcctacccactgaacatttatgactgtggcaatagtcactctgaaatactagcagggctcacaatataagaaaacatttagaaaaggattgatgctttagaaccagagtttggggttttgtatcacccctcatgcacatgaaaaaatctgggtaaaaacaataaactccaatggaggaggagctggtagtgagcccatgatagagtcaccattgttaaaattcaagtatgacaccagagcacctaaggacgcctcaggaagtgagctcaccagttacgtcaggggtgtcttctgctcttacccttgtttgaggtctttgctctttcagatttataggaacatgggactacagaaaggagattgctttcaaagtgattaaattctggacaataatgtctatgagaagatgaaagaaattagtatcaatgcagttaaattagtgaaaggagtgaaagctaagctctcataaaatataaagcattattatcaagggattgtgtctttgttggatacatctaacctatgcttaataaaccataatattcacctctcttcagtttatgagattgccagttagtctgattttttaacagtgtgcttttcaacattcaatgtgtgagactgtttttaaccaatcaaattagaatcaaatttgcaagtgaaatgccacaagacagaacagtatattctctcctgaagttgaaatatgaaacaccattcattgccgaatttactaattttatgacccctatcccaaagtgcttggaagaggatttatgttgactatattcatgaggcttattgcccgtgatgtcattgctcattattgtgtttactgatttatttctcatatgcccaacgtcagttttgttttgttttgtttccttaaatgagtggaactgtcctttagaattgcagtgcatagggctgggcttgatggttcatgcctataatcccagcacatttggaggccaaggcgggcatatcacgaggtcaagagttcaagaccaacctagccaacatagtgaaaccccgtctctactaaaaataaaaaaattagctgggtgtggtggtgcatgcctgtaatctcagctacttgggaggctgagacaggagaatcactgggacccaggaggcggaggttgcagtgagctgagattgtgccattgcactccagcctgggagacagagtgagactccatctcagaaaaaaaaaaaaaaaaaaaaaaaaaaaagaactgcagtacatagttgataggaacagtgctaaactctttaatttagaaaattcaaggcaatcactgccatatattttcaattgtctgttctagctatgtggtgagcaacttgaagacatgatccctgaaattgaagagagttaagacatagagggttttaaggatctttaggattttgtgtgctgtgacacattctttttaatatggcagtataatcaccatttctaagatcatctctgtcttgaatatttcagccaaaagaaatgcaaatattcctgagggtagtaacctgttaataagtcagctgtcataaacagtttgtccagattaatgcctgagcaggagtagcacatgggaggtgagagccagaatgagggaaagggcagtacatttcaaaggagaaaggcagagaaaaatatttgaagaatgcaaagtagcttgaaccaccttgctgaccaatcttaggtatcatggttacctctgtggaagcacaaggtgggtatttgtttagacttgatccttcctgggacaaagtgctggtcaggatagtaaagggagattaaatgtacttaaatgtgcttccagaagacaggtatgtcatcataaagaagaaagggctattagctcctgacctacttagaaaaagtgtaactaaagtggaaccaggaattgtgtgagatctgcctatgtcctgttctctctctctcagggagagcagagggcaggaggtttcaccaggagctcacctgactctctcctaggcacctatgtttctgactttccttagatacaaccagaaagctaacacacttagatacttggagacatttgaaacaactcgacagccagttcactatccttggctacccaactgtttgggagagtaggaatgctccagaagaaaattgaatcggcaccactttcccattttgacccttgagaaaagaaagaaagaaaatcagcatttattgagtaatttgccttgtgccagacaatgtatcatatgttttatatataatattccacaggcagactctgttattccctttctatagatgagaaacagactctgaattgctttagacgactagcttaaagttcatgaggcccggaagggatgaacctagaatataaacccaagctctttaatttctaaatcagtggccttcctcactatcattatgctgtgttatgtaattgatatctggagttcagggaaaatcaccatactactttgtatgagaatagtgtgtatatgtatacatttgtattttatataaacctatgcatggacatattaaagtgagtttgtttgtttgtttgtttgtttgtttgtttttgagatggagtctcactgtatcacccaggctggagtgcaatggcgtgatcccggctcactgcaatctccacctcctgggttcaagcaattctcctgccttagcctcctgagtagctgggattacaggcacctgccaccacgcccggctaatttttgtatttttagtagagatggggtttcaccatgttggccaggatggtatacatctcctaacctcatgatccacccacatcagcctcccaaagtgctgggattacaggcatgagccaccatgcctggctgtgagtgagtgtttttgccaacctgatagccttggtttttttttttcctgtaccttctcagtgtcttgggatgggatccatgatacctgaggaagtaacaaagattatacaatcatccctaagtattcacggggaattgattccaggacccctgaatcaattccctgatataaaatggcaatctcaagtccctgatataaaatggcatagtatttacacataacctgcacacatcctctcatttactttaaccatctctagattaattaaaatacctaatgcaatgtaaatgctatgttaattgttatcatactgaattgtcttttatttgtattatttttattattgtattgttatttttaatttgtatatttttgacatttttaatgctcagttgcttgaatccatgggtgtataactcacagataaggaggcctgactacattcccaaagaagaaaaatgaggcaaatcagtcttttatttaagaatatttgggcatgttttatcgtatccacaatatttctttttctttcttttttttttttttttttttttttgagacagagtcttgctatgtcacccaggctggagtgcagtggtgcaaactcggctcactgcaagctccgcctcccaggttcatgccattctcctgcctcagcctcccgagtagctgggactacaggcgcctgccaccatgcctggctaaatttgtgtatttttttagtagagatggggtttcaccgtgttagctaggatggtctcgatctcctgacctcgtaatccgcctgcctcggcctcccaaagtgctgggattacaggcgtgagccaccgtgcccggccacaataattctttttctaatcatggtaaagtgttcagcaaacatgccaggtttcccagtgtttcaacatgcaggactaatcttgtagttaatgtatattccttttcttcctgagccttttaacaggagatgtttttgcctagttgttgttatttttctaattgcccaattttcttttctctgttaaacactaattaaagaatgatctcaggactgccacctttttggagaaaacattaatctgctgccctcgctacattttaatgggcctaatttatccctattatctactcccttcaccaccccaactgagcaaggaaaacattcttatcccctgcacccttctcatactctactgcatttttgcattttattttccctactagcttcaactgatgctgcctagccttgtttatgtttacttttcattatcagcagaatatgcatatgactataagtcttctctcctcctccctctttccctgcttgatctgctctgtattaatttcttttcctattactaaacctgtatgtacctgtatctgttgatgaattaattaatcacccagacatagctcagcacctgtatgaaataggctccaggacactgaagcatcaattctagtctccaggaaccagcagtctgaaaggagaggccgacacataaacagaaaattgtaataaaatgtggtacaggcaaccatacagattagaagaagattcaggaacacacagaaggagctaccactccagccttggtagcagggaaggcttcccctattggctgtcatttggaatgattgaccataccataggtagaaaaatgggttgaatccagaattcatttgcattaatagcaaaccttgataatcagtgatattgacttccctttcatctcttttacacaactcagtaatatttccattaagaaaatattataaggcactttggaatgtccatattaaaaatagtatattaattaaaatagcacaaagctcaactaataatcaaaccagccataaactatggagcaaagaactttgtttccaagagatttaaaaaaaaaaaagaaaaagacaaagctacctgtaagccctgagctgattgtattggcttttaaagactttttaaagcctctccttaaagcaaatcacactgtattagtctgttttcacactcatgataaagacatacccaagactgggcaatttacaaaagcaagaggtttatggacttacagttccacgtgaccggggaggcctaacaatcatggcagaaggaaaggaggagcaaggcagatcttacatggatggcagcagacaaagagagcttgtgcagagcaactcctgtttttaaaaccatgagctctcatgacacccactcactatcatgagaacagcatgggaagacccatccccattattcaatcatctcccacctggtccctcccataacacatgggaattatgggaactacaagatgagatttgggtggggacacagagccaaactgtgtcattctgtccctggcccctctcaaatctcatatcttcacatttcaacaccaactatgccttcccaacagccctccaaagtctccactcatttcagtattaattcaaaagtccacattccaaagtctcatccaagacaagcaattcccttctacctatgagcctgtaaaatcaaaagcaagttagttacttcctagataccaagagggtacagacattgggtaaatacaccaattccaaatgggagaaattggccaaaacaatggggccacaggccccatgcaagtctgaaatccagcagggtagttaaatcttaaagctctaaaatgatctcttttgactccatgtctcacatccaggtcatgctgatgcaagtggtaggttcctatagtctttggcacctccactcctgtggctttgcaggatattgcttccctcctggctgctttcacaggctggttttgggtgtctgcagcttttccaggtgcacagtgcaagctgttggtggagttaccactctggtttctggaggatggtggccctcttctcacagctccactaggtggtgccccagtagggactctgtgtgggggctccaactccacatttcccttccgcactgccttagcagaggttctctatgagggtcccacccctgcaacaaacttctgcctgggcatccaggcattttcatacatcctctgaaatctaggcggaggttcccaaatcccaattcttgacttctgtgcacctgcaggctcaacaccatgtggaagctgccaaggcttgaggcttccaccctctgaagcaacagcctgagctataccatggccccttttagttatggctggagtggctgggtcacagggcaccaagtccctagactgcacacagcagagggaccctgggcccggaccacaaaatcattttttcctcctaaacctctgggcctgtgatgggaggggctgccgcaaagttctctaacatgccctggagatattttccccattctcttagtgattaacatttggctcctcattacttatacacatttctgaagccagcttgaatttctcctcagaaaatgggattttcttttctattgcgttgtcaggctgcaaacttcccaaacgtttatgctgtctttcccctttaaaactgaatgcttaacagcacccaagtcacttcttgaatgctttgctgcttagaaatttcttctgccagataccctaaatcatccctctcaagttcaaagtttcacaaatctctagagcagaggcaaaatgccaccagtctctttgctaaaacataacaagtgtcacctttgctccagttcccaataagttccttatctccatctgagaccacctcagtctggaccttattttttatatgcctattagcattttttgtcaaagacattcaacaagtctctaggaagttccaaactttcccacattttcctgtcttcttctgagccctccaaactgttccaacttctgcctattacccagttccaaagtagcttccatgtttttgggtatcttttcagcagcgccccactctactggtaccaatttactgtattagttcattttcatgctgctgataaagacatacccaagactgggcaatttccaaaaaaaaaaaaaagatttatgaacttacacttccacatggctgggaaggcctcacaatcatgatggaagacaaggaggagcaagtcacatctcacatagatgtcagcagggaaagagagcttgtgtagggcaactccagtttttaaaaccatcagatctcatgagacaaattcactctgacaagaacagcatgagaaagacctgcccccataattcaatcatctcccaccaggtccctcccataacacatgtgaattatgtgagctacaagatgagatttgggtggggacatagagccttaaccatatcatacactcagttctgatattcttggctttctgacatcctggacaattagcaataaccaaacctaaaaggtagagagttatttgaaggattgtattttgatcccagggaaaatgtgacccccaacacctgaataatgaaaaagaaaaaaaaccatacacacagaaactatgaaacagttgaacaaaaaacctctttgaaaaccaacagatccagggaataaaaataacagcagatatttagctttctcaatagctctccctgttgtccctgcatgataaagagcacaataattagtgttgacactgacggtccagaggcagcagataaagatttatttagattaaaggaaattcatttcagaaggtaaagaagatggataatttatggtgaaaaatttccctgaaaactgaattaaatgaaacaattttcttctttagcaggaatatatttcaatcagcaaatgaccacacacatttaacactgtgtcatcctgaggttgatattggatgctcatgagtttcttttttgtttgcttttggtgttaacttactgcctctcttgcggttttccagattgctaaaccttctctattgaaactcttctgtatgtcttaaggtactcctcaaatagaaggtgactgcgattgtttcaaaagagaaaattgtttctcatgtcagcagtattttatttctttgtaatccaagaaaaaagagatacttgtttaaaaatccaaagttctgacatcttgaatataacaactgacactaaaagttttttaaattgattcaggacaatgcatttaaaacatatttataaagcactttatatagatcatcaagtgactttagatatagcctttcacattacaatgaattatattttgttcagctttcttgtcatggtaatccatttcatgtgttttcttttcacagctgccataatactctgactcaccattgccttttttccataattatcagcatattctccttaatcatatggaaatctattattatttttgtctcacggcattacagaatgtagacctgaacttttccgaccatgtcactacagattaagatgtggattctttagaatagaatgtgtatttttagaacaccattgtgttcccaacccttatgtaaacatcactatcatgtagaccccaaggaatccttgatttcaggcatagccttgctggggagaggtactcacacacagtgggattagaacaatttgaagcctatgcattatttggggctaaactgaatatatgacttgcacatatagggaagatccttgtatttgtaagatgctatcacatcacatccaatgttctttaacaagacatgatcaattttgaaattcaagtgtttaataagcttctgtggagaagcaacaaaaacacagttttgcatggtgaaaagagagaagaggtatctacatatagtgcgggcagggagaagcgagtgcattctatgttcctgttctatcatctgtgttacctgcatcttgtactcattctgattctggttgtccctccctcccctacatctcccactctgaggtggtgttttgaatgctcttgaaagtctgtcacatttgcttgatatggttttggcctgaaaacattagaattgataaaccaatttgtttttttatgaatcactaataatttgagcatgatagatttcctctaaatgcagagctcattctttcatggccatctgatgtattaacagaagctggtctggagaaaggctgaggcttcctccttaagcatgttcccagtgccaactgataagcaattagaaaaagcagagctggcatctgaaggctcctgtgttctagggtgggcatctcaatatctgattctcattccatcgtattcatttctggttgtgtgactttgcttacttatagtctctgaggctacgtttcttcccctgataaatgaagggttttttgattttgcacaggactattcctgaaatagccatgggaaatgaatggagaatagtttgtatatatttttaaatccactgaaataaatctggtcatttattcttttcttgaacaaagattaattacagatgtattggacattatgtctataggaagggtaggaggtgtggtacaatagaaattccagacagagagaaatggagatgatgatagctatattgagcctagcagggccattggcctccttgctagaaagtttgaatttatgctgaaggcaaaataaggagatatgattttatgtactttaaagatccaactaaaaccgcatggagactggagtagagagagaggtgaaatggaggcagagagcatccttaaaaataatccagtgaagagatggtgagtgtctgaactagggcttatggcattagggatgaggaagtgtggagacagatgaggaataactaagggatagagttggcattgcttggaacataattaatgtgggaggtgagcaaccctggggaagatgctaagttcagtctgggacaagttgagtttgagggcatgcaggcagagtgaatggttttatataagtgtttggagtgtgggagagggtttagggatatagctatagatctggagtgcagcagcacaccatatataaataaggctctttgggccactgaattgatgagattgcccaaggagagaaaggaagatagcaaagaatagaattctggggagcagcagaacttaggggagcaactaagaaagggagccaaaaaaggaaactgagaaagaatagtcaggcagctgagagaagaacaagaagggtggagtcacaggaaaaaagaaattgtcagcaataacacatgcagggagatcagatgaaataagaactgaaatcatccagtggtttgtggatctggataagtagctcagagagaagtcagatgtgtttccagaaaatgtttattgcttaagcaagaccaatccctgtgctagggtactttgccaaggtttctaaattggctttatttacagaaggattacacctctacaaatgcacacaggtcaatcaatccactccattctcagccaagatcattatgacttcttttcatatgtgctttaattttcgttcatttgtttgtttgtttagaaataggagtgttgaaaaataacctagttgccaatttggttatgtgcaactgttaaatatagatggataaatagatgggtggatagatagatagataagacagataaatagtggctaccaaaatgtttgaggtaggagagcttcagctactctcttactatactgctaacaattataaggaaagaaattctcaacaaaatgtattgatggattctcagtttcctgtcctaataggtgctctgaacaatagcttgcatgaaaggagcacttgaggtaaacctgctgcctttgggaggcaggattgttaccttatgggagtgatcaggcaggcagaaattctgcatctcagtctcggggcacagagcatttagggctgagacctcgcgtaccatccctaaggatccaggcctcaggcatagctatatgatttgttcttcatataatcgtgggcagtatctctaaaatattttagcccatccacaatgttgaatatcagtattttcacccatgaatcatccgttgtgttaattaactggccaacaatttcaccaatgaaaagccatttctaatatttgttatgcaaagcccctgatgttaattgaaatatacctaggagcatttacactggccacctctactgtgtgacttttatgggggaaaacttgtgaccacccatgagggtgtgaattcctgattaaggcaataaactgctccttcagtgggatttaaagaaaagaacacacataactcactctttttttctaaggagaattttaaagtaaatagaaaatatcatagtaaggaggtaggaagactgagacatcattgtgaaaccaccaactacatctttgtgatgaatgaaaatatcatttggaaacaatatctgtcacactaaaaactagcctttcagagtatgtttattctttttttttttaattcttttttttttttctgagaaggagtcttgctctgttgcccaggctgaactgcagcggcacgatcctggctcactgcaacctccgcctcccaggttggagcgactcttctgcctcagcctcctgactacctgggattacaggtgcacgccaccacactcagctaatttttgcatgtggggtttcaccatgttggccaggctggtcttgaactcctgacctcaggtgatccgcccgcctcggcctcccaaagtgctgagagtacaggcttgagctactgtacgctgcccagagtatttttattgtgccacaaatttttgaaatcctctccataaccgatgttcagatctcattctcttatgaacatttttgtcatagcccactcattctcatacacacagacacacacacacacacacacagacacaccacacgcacacacatactaaaaacagcatgatcatcaaattgcctgaagtgtaccatcataatatttcacatctgtgcttgtacaaagagaaatattctgatgctctgctgtacctgcaagttgtttcagtcagttaagaggttcctcagctaacaacctgagtaaggctatacatgattaagttaaagagcgaaaacccgaatgctagcatagacctgtagtatttatatatcatttttttgattacaaaaatattggtatgcttattacataacgttcaaatattacagaaaagcctaatgtagaaaatgaatatcttcagtaatcctatttcctaagataactgctgttagcttggtgtggtttatggaagaacttttcccttgcaagaataaatatatgtaaatacaattttttcgataggatcctagtcatatatgttgttttacaatttttaaataattcaccctaaacacatcttctaatcagtatgcagagatagttttttagataactttagggtttccatttccaatgtcaaattaaagccatcctattacatactttctgaacacattgtttttctttcttttttattagactttaagttctagggtacaagtgcacaacgtgcaggtttgttacatatgtatacatgtgccatgttgttgtcctgcacccattaactcgtcatttatattaggtatatcgcctaatgctatccttcccccctccccataccccatgacaggccccagtatgtgatgttccccaccctatgtccaagtgttctcattgttcagttcccacctatgagtgagaacatgcagtgtttgattttctgtccttgcgatagtttgctgagaatgatggtttccagcttcatccatgtccctacaaaggacatgaactcatccttttttatggctgcgtagttttccatggtatatatgtgccacattttcttaatccagtctatcattgatggacatttgggttggttccaagtctttgctattgtgaatagtgccgcaataaacacatgtgtgcctgtgtctttatagcagcatgatttatataatcctttgggtatatacccagtaatggcatggctgggtcaaatggtatttctagttctagatcgttgaggaatcgccacagtgtcttccacaatgattgaactagtttacagtcccaccaacagtgtaaaagtgttcctatttctccacatcctctccagctcctgttgtctcctgactttttaataatcgccattctaactggtgtgatatggtatctcattgtggttttgatttgcatttctctgatggccagtgatgatgaacattttttcatgtgtctgttggctgcataaatgtcttcttttgagaagtgtctgttcatatcctttgcccactttttgatggggttgtttgattttttcttgtaaatttgttgaagttctttgtagattctggatattagccccttgtcagatgggtagattgcaagaattttctcccattgtgtaggttgcctgttcactctaatgatagtttcttttgctgtgcagaagctctttagtttaaatatatcccatttgtctactttggcttttgttgccattgcttttggtgttttagtcatgaagtccttgcccatgcctatggcctgaatggtattgcctaggttttcttttaggctttctatggttttaggtctaatatttaagtctttaatccatcttgagttaatttttgtataaggtataagaaagggatccagtttcagctttctacatgtggctagccagttttcccagcaccatttattaaatagggaatcctttccccatttcttgtttttgtcaggtttgtcaaagatcagatggttgtagatgtgtagtattatttatgagggctctattctgttccattggtctatatttctgttttggtaccaggaccatgctattttggttactgtagccttgtagtatagtttgaagtcaggtagcatgatgcctctagctttgttcttttggctgaggattgtcttggcaatgtgggctcttttttggttccatatgaactttaaagtagtttttttccaattctgtgaagaaagtcattggtagcttgatggggatggcattgaatctataaattaccttgagaagtatggccattttcacaatattgattcttcctacccataagcgtggaatgttcttcctttgtttgtgtcctcttttattttgttgagcagtggtttgtagttctccttgaagaggtccttcatatcccttgtaagttgggttcctaagtattttattctctttgtagcaattatgaatgggagttcactcatgatttggctctctgtttgtctgttattggtgtatagcaatgctagtgatttttgcacatttattttgtttcctgagactttgcagaagttgcctatcagcttaaggagattttgggcggagacaatggggttttctagatatacaatcatgtcatctacaaacagggacaatttaacttcctcttttcctaattgaataccctttatttctttctcctgcctgattgccctggccagaacttccaacattatgttgaatagaagtggtgagagagggcatccttgtcttgtgccagttttcaaagggaatgcttcaagtttttgcccattcagtatgatattgggtgtgggtttgtcataaacagttcttattattttgagatatgtcccatcaatacctagtttattgagagtttttagcatgaagggctgttgaattttgtcaaaggccttttctgcatctattgagataatcatgtggtttttgtctttggttctgtttatctgatggattatgtttattgatttgcatatgttgaaccagccttgcatcccagggatgaagccaacttgatcgtggtggataaactttttgatgtgctgccggattcggtttgccagtattttattgaggatttttgcatcaatgttcatcagggatactagtctaaaattctctttttttgttgtgtctctgccaggctttggtatcaggatgatgctggcctcatagaatgagttaggcaggattccctctttttctattgattggaatagtttcagaaggtacaagctcttccttgtacctctggtagaatttggctgtgaatccatctggtcctggaatttttttggttggtaggctattaattagtgcctcaatttcagagcctgttattggtctattcagggattcaacttcttcctggtttagtcatgggagggtgtatgtgtcgaggaatttatccatttcttctagattttctagtttatttgcacagaggtgtttatagtattctctgatggtagtttgtatctctgtgggatcagtggtgatatcccctttatcattttttattgtgtctatttgattcttctctcttttcttctttatttgtcttgctagcggcccatcaattttgttgatcttttcaaaaaaccagctactggattcattgattttttgaagggttttttgtgtctctatctccttcacttctcctctgatcttagttatttcttgccttctgctagtttttgaatgtgtttgctcttgcttctctagttcttttaattgtgatgttagggtgtcaattttagatctttcctgctttctcttgtgggcatttagtgctataaatttccctctacacactgctttaaatgtgtcccagagattctggtatgttgtgtctttgttcttattggtttcaaagaacatttttatttctgccttcatttcattatgtacccagtagtcattcaggagcacattgttcagtttccacgtagttgagcagttttgagtgagtttcttaatcctgagttctaatttgattgcactgtggtctgagagacagtttgttataatttctgttcttttacatttgctgaggagtgctttacttccaactgtgtggtcaattttggaataagtgtggtgtggtgctgaaaagaatgtatattctgctgatttggggtggagagttctatagatgtctattaggtctgcttggtgcagagctgagttcaattcctgggtatccttgttaactttctgtcttgttgatctgtctaatgttgacagtggggtgttaaagtctcccattattattatgtgggagtctaagtctctttgttggtctctaaggacttgctttatgaatctgggtgctctagtattgagtgcatatatatttaggatagttagctctttttgttgaattgatgcctttaccattaagtaatggccttctttgtctcttttgatctttgttggtttaaagtctgttttatcagagactaggattgcaacccctgcttgtttttgttttccatttgcttgctagatcttcctccatccctttgttttgagcctatgtgtctctgcacatgagatgggtctcctgaatacagcacactgatgggtcttgactctttatccagtttgctagtctgtgtcttttacttggagcatttagcccatttacatttaaggttaatattgttatgtgtgaatgtgatcctgtcattatgatgttagctggttattttgctcattaggtgatgcagtttcttcctagcatcgatggtccttacaatttggcatgtttttgcagtggctggtaccagttgttccttcccatgtttagtgcttccttcaggagctcttataaggcaggcctggtggtgacaaaatctctcagcatttgcttgtctgtaaaggattttatttctccttcacttatgaaccttagtttggctggatatgaaattctgggttgaaaattcttttcttcaagaatgttaaatgttggctaccactctcttctggcttgtagagtttctgccgagagatcagctgttagtctgatgggcttccctttgtgggtaacccgacctctctctctggctgtgatgggcttctctttgtgggtaacccgacctctctctctggctgcccttaatattttttccttcatttcaactttggtgaatctgacaattatgtgtcttggagttgcccttcttgaggagtatctttgtggcgttctctgtatttcctgaatttgaatgttggcctgccttgctaggttggggaagttctcctgcataatatcctgcagagtgttttccaacttggctccattatccccgtcattttcaggtacaccaatcagacgtagatttggtcttttcttatagtcccatatttcttggagcctttgttcgtttcttttactcttttttctctaaacttctcttctcgcttcatttcattcatttaaccttcaatcactgataccctttcttccacttgatcaaatcggctactcaagcttatgcattcatcacatagttctcgtgccatggttttcagctccatcaggtcatttaaggtcttctctgtgctgtttattctagttagccatttgtctagtctttttttcaaggtttttagcttctttacaatgggttagaacatcctcctttagttcggagaagtttgttattaccgatcatctgaagccttcttctctcagctcgtcaaagtcattctttatccagctttgttctgctgctggtgaggagctgcattcctttggaggagaagagctgctctgatttttagaactttcagcttttctgctctatccctatctttgtggttttatttacctttggtctttgatgatggcgatgtacaggtggggttttggtgtggatgtcctttctgtttgttagttttccttctaacagtcaggaccctcagctgcaggtctgttggagtttgctggaggtcgactccagacgctgtttgcctgggtaacaccagctgaggctgcagaacagcaaatattgcagaatggcaaatgttgctgcctgatccttcctctggaagcttcgtctcagaggggcacctggctgtatgaagtgtcagtcggcccctactgggaggtgtcttgcaatttggctactcaagggtcagggacccacttgaggaggcagtctgtccgttctcagatctcaaactctgtgctgggagaaccactactctcttcaaagatgtcagacagggacatttaagtctgcagaagtttctgctgccttttgttcatctatgccctgcccccagaggtggagtctacagaggcaggcaggcctccttgagctgcagtgggctccacccaattcgagcttcctgaccactttgttttcctactcaagcctcagcaatggcagacacccctcctccagcctcgctgccatcttgcagttctatctcagactgctgtgctagcagtgagcgaggctccatgggcatgggaccctccgagccaggcatgggatataatctcctggtgtgccatttgctaagactgttggaaaagcgcagtattagggtgggagtataccgattttccaggtaccgtctgtcacggcttcccttggctaagaaagggaattccccgaccccttgtgcttccaaggtgaggtgatgccccgccctgcttcggctcacactgcgtgggctacacccactgtccgacaagctccagtgagatgaacctggtacctcaattggaaatgcagaaatgacccatcttctgcatcactcatgcttggaactggaactctgaacagattcttttcagcaggcacagcagtttaattaatatggaaaataacaataataataataatgtatattgaatgtttgtgtccaacaaaattcatatgttgaaactgtaatctcattatttggaggtgacgcctttgggagttactaggtcgtgagggttgatccctcatgaatgagatcagtgcctttataagaagaagccatagagctagctatctctctttttaccatgtgaggatactaggagaagttggtagtctgcagcccagaagagggccctccccagaagccaaccaggctggcactccagtcttgggcttccagcctccagaacggtgagaaacaaatttctgttgttgacaagtaatttgttatagtagctctaactaagactagtaaaaataataaagaaaatattcacagacataatcaggaaatatttctccggggcctgacttagcctaagctatttccattttttttttttttttgagatgaattcttgctctgtcacccaggctgtagtgcagtaccacaacctcggcttactgcatcttgtgcctcccagattcaagcaattctcatacctcagcctcccacgtagctgtgactacaggcgtacaccaccacaaccagctaatttttgtactagagacggaatttcaccatgttggccaggctggtcttgatctcctgacctcaagtgatctgcccacctcggcctcccaaaatgctgggattacaggcatgagccaccgagcccagcctatttctacttcttagaggccccacaaaatgataatgaaccagatgaatagtttctatgtagcttttgaagcaaacactacagggttggttggcatatatatattgctaagcaggcaaagcttaaattatggacttcagatgcccatttttacattggtttctaaacccataacttcatataacttcatcctcttcatcaggaacccagtgtctcggggtccaaggacaccttagtgtgagtgccagctctgctactcagcagctgtgtaattctgtgcaaatcatctaacctctcaaagcctcagttttgttacctttaaaatgggcctaatgccttccccacagagaacctaaaaattaaagatcagactcagggtctgacccattgagtgacactgaaagcccatggctttcaagaaatgttacttccttactcccaaatccaaacctgctctaagggagtgataactgactcttaattgttgtaggcactatattagatattgctgagtacacattttcactctttccactaaactgtgattttcattttataaaaactgtgtaatgattttgttgttgttgatcatttgttttccccaaagtgaaatgcagaacccaggctagtagcagataatagcagagccactgtggttgaaatggggagaggggttcagggctggaccacttgatattctgcacacctgagcctcctctgcagagcagagcgctcccagaacacagcttgaaaacctctgcataggccatcatgcttcacaggaactgttgcaaaaggatctcatttattaatgaggccatatcacaggttaataactcattatgatgtatcctctcaatatgtttgcatttgcctattacctaactctgaagaatgtgtttctaaatatgaatattccagcataacaccaatcagctagaggttatttatttttcccaacttggggatgagctgaaagggtggagcagttgaggtgttgagtacttctcaatatctctgttttcaccaactgtggaaaactctctctcttgactacccataagtctggctctacccagagagaagtaaactgctttgggctttggaaggcaagaagaaaatggctgtgggtctctgtttgtgccccatcttatgggaagaggctgagggggcagagatatttgctcaatcaacaaggtgacagctcttacagtacctggaggtgggcagaccttcaggacatcctatgttaatccgacagcagtttatggattcatgaaaagaccagacaaacctatatttaaagggattgcccttggggcagacatccgattattgaccaatgtattaaaaggtgaatagaaaggcagtacaacaaagtagttaagagcaagggctctggaatcagaggagattggaattcagctctgatatgattagctctgtcaccttgaacatattccttaccctctattaggctcagttctcttgactgtaaaatgagagtagtcatattgtttactcacagggttgttgtgagatttagaagacataatgcatgtaaagcccttagcccagtgcctgctacttagtaaggactcaataaatatagctattagtattcatgttggcctccttatgcattcaactttctccccatttgacaaagtgaaaatatatttaagagtactttgtgttgttgaattggtgctacaatttatttaatgcttagaattatctgaggtataggataatacttattatgagaaatatttaatcgtatcatttagtaatggatgattacacacattaaaacctcaatttaatgttatgtagaatcacatgctaaggatccacaaccagaatataatcacctgtgtagactgtacttaggttacttggatatcgtggcaattattagtggaaatagagaaatccattttcaagagctaaagaaagagaaagaaagaaagaaaaaaagccaggattgaaccttgactgacttaggttgctaagaccttgacttttgtcatattgtaattttgagcacaccatctttgcatcccatctttgcatggcctttgcaatgccatctttgattgcagtaattctgtgcaataaactttgttcagtatcccactatattcccaggattctgcacagtgagaggggacttagcaatatctataattcaaccaaattattgagaaactattgggtttgaagcactgttatctattattatcttaatacacaatgttcctatagcatttaatgattttaaaataatttcttttatatattttcacatttgattcaacctctttgaatccctatgaattatctaggtgaggatcaaagtttctaatttctatcgcttttgttttaaatatatactacctaatttaagatctagaataccagtctgtgtccagactactcaccaatcgacccattcacctatcttctctgtaatacctgtaacactgcagagttgatgtacatagttctttacctttgcccattctatttcctcagtacctgcctttagaaagggtttgattaacaaaaacaaaaatctatatctaataagaaaaattaaatatataacaaaacctcaattttgtgtccattattgattcatatttctagccctcttgcttcttaattagcactctttttgttaagtccctttattttctctccatttaacataaacacatcaagagaggtttctctatgcaactttatgtttaattactctgcattttatatcaactgtttacatttttatgatataacagatgtatgtttattccttccctcacagtacattaaattgaaacaaacaaacaaaaaaaacacaaaaaccacaaccaacaaaccaacaaacaaaaatacccaacttcctgtgcaattgcatccctttaataccttactttgttttgaccacaaaggatactgaatgcagtataccaaggatactgctggggatactgactgcagttcttcctgtaactgtaaaagttcacgatttaaatgaattcctttgccctcttcttctgccatagacatactaattcatcagttcatgcttgatacttggaaagaagctacacaatgctcctctctccccagtctcctggagtcaacactgaatatttttgacacactcaggacgtctgccacatgggctcacaaataatagaagactcatcagcttttatatggcatccacgttttttccttctgcctcaaggcaattaatttaacagtaagttgcctagtttttgcattttttaaattttcagctgggcatggaggctcatgcctgtaatcctagcactttgggaggccaagactggaggactgcttgagctcaggagtttgagaccagcctgggcaacatagcaagacctcggctctattaaaaataaaattaaagagttaagaaaagattccttctttgggatggccttcatggttctgggtactgctgcatttgtcatggatagtcacactttgcagtgatttcttccatgtttgctgcttctgttggacttcttgctgctggtgtaggagcccaccatatgtgtgctgaagctcagcttgtacaccctctcatcagaagttagaattcttttctgctattttagagttatatattttccatctgagtatctaagctttaggaccttaagggtctgttaataacaatacttctttctggttttttgtttgtttttgttttgttttgtttttgttttctgagacagagtctcactctgttgcccaggctgaattgcagtggcacaatctcggctcactgcagcctccacctcctgagttcaagcgattctcctgcctcagcctcccaagtagctaggattacaggcacccgccaagcatgccgggctaattttggtgtttgtagtagagacggggttttaccatgttggccaggctggtctccaacgcctgacctcaagtgatccacctccctcggcctcccaaagtgttgggattacaggcgtgagccaccttgcccagcccttcccgtttttattaaagactaccagctgcatataataggaatcaagcacataggttctgatagctcattaagtgtaggattactgccctctttcaaggactactactttcttactgggacaaatgttggcttaagttctttccccagattggattttcttctgcagtagaggggtgtatggtagagaaggaagtgatatggggacctcaggccagctggcaagttggaaagaaatcccatttcttacaataccccaccctgcccaagttaggggcttacaattctgctgacccatgctggggcaccatgtcccaggaatggctaagtgaaaggtgatttaccaattcagcgactatactagaaaatgcagactgagtctaaatctcctttcatgagccacttattcctgatatactcatttcctggcattcagcttcctttcttccattggtacctcttccccttaattattgaaaatttcatggaagaagggtggaaatggatccgatgctgcactaccttggtttgattttccatgtgctacatgtcttataaactgcctgagcaatcaaaaagatgaaggaaaggatgaggtggtattggacagccaaagagctttcagattaatgatcaaaatgtgtgcaagacagatccttttggtaggatgctttttataggtttttaatttctgaaatttaatcatgcaggtttaattgcctccagttgtatggctttaaattgaaggagtttggctttttatctaaattgcttcataataaaaccactgcttttgagaatgcttaccagtgctcagactcctggaaggctttgccattccccaccactgccaaacagccaacacttgacatgtagaattatggagagcaaaccaacacatcccctttgcccaagccaaacacaagggcatttgtcaatacacagtgagataggagtcaggatgaaaagcactggtgacaaaaaccaggctagaaaatcagccataggccccatcatctcatcatcctggtctatattttttaaattacttttctgcctccagagtcccaaattctgcttatacacaaagcaagtcttacttccacaataaattattctcatactctacctgatttcaaattatatctttatcttatcacttatatttccttataccatgcatagttttgttaatatttaaatattaaatttgctgtttatatttgcaaatcttatataatgcaaagagaaagtcatgactcagatcttctagagactcagatcctaaaggttagggtgaaggaatttaaggtccaaagaaatgccataggtgactcctctgaaatggtacaactagttaatggcaaagacagaactagaattttggtcttctaaagcccaggcccaagcacttttttcttcttcactcttgctgtcacaatacataaattagttagctggtacacaaaccctaggaagccaggtgggtgtacaaggatgtacaagaaaaactcaaaagtatttgtcatctcattgtaaataaagcttacgttccctatcaggcagtgataactttatgcctggatctctttagctataatctcaaatcccaccaaagcaccttcttacacagttggatttgcaaatatgtacaatataatatgtcagcatttttgtttttgttgtttaataaatgttaaagtcctgaaatttgaaaaaaagagaatgagattgtggtttcttttgagatttcatctaaaatgactgtggacttctcctaatttgggggttatattagttttgcttggataggatttgtattcgggaaaatctcagtaattgattgtactcatgcagctctccataatctgtttttttacatcctaggtttcagatacccatcatgaccatattattatctgtttattgagtttgtaaattctatgggctgtccagtgcactggaaagatcaggcaaattgagttaaagttagtgtttctcaggatgtaacagaggctttctttgagtggtctttatttctggaacgtaatgaagaatacttgttttccaggaggcttttggtcaataaagcgataaacgaaaacatcaggaagtcaggatagaggaagggaagagagaggaattgctggtggcgcaatctcggctcacagcaacctctgcctccagggttcaagtgattctcctgcctcagcctcccgagtggctgggattataggcatgagccaccatgcccagctaattttgtatatttagtagagatgggttttctccatgttggtcaggctggtctcaaactcccgacctcaggtgatctgcctgccttggcctcccaaagtgctgggattacaggcgtgagccactgcgcctggccctatttcttacatataaaattttctcagtctccttaaacagccatatcacagaacactcaagagttctgtgttcttgtcacaggacactctttaatctgtctgttggaaggaaagagtgaccaccacttaggatatatcctaaaagcaactttgctttctacagaatgaactaggctcccatctagtttggaaaatttgatcccatttaaggctttgaatcaatgctcatgcctgtggcttcagatgtgactgataatcttaaaaagaggtattatcccagcctccttggtgttgtagtttgccaggtccaaggtaatcatactgtttagataccacacttgagtatatgcattacgggtagtaaagctgacatataaggagttaagaagaaagaaatctgccagtgccagttcctagtgtgccattggcactcagtgctcttagatggcccctcgattgtcccagccagagaaccagccttagctgctcacttcccatgacttgttctagccctcttgacacataaactctcttgtcttctgttctcatgtccctagagcttaggatcctgctcatatcataaagaatacagaaagaaggacactctcaactgccagctaccaaggagaccccacactgccacttctcaatttataccaaccacatcatcttcattagcacccacccttaccctcttctcttttataattaatgaagcatatgtcttctggccataagcaagattctctccacctaagtcttagagtcgggaatgacattggcatactcatggcttgtatctctttgccaggttttcatatctggcctgtcaattcagtcagtcctctacagctgcatttatttttatttttatttttattttattttgagatggagtgtcgctctgtcgcccaagctggagtacagtggtgtgatctcggctcactgcaacctccatctcctgggttcaagcgattctcctgcctcagcctcccaagtagctgggattacatgtgcctgccaccatgcccggctaatgttttgtatttttagtagagacagggtttcaccatgttagccaggatggtctcaatctcctgatctcgtgatctgctcacctcggcctcccaaagtgctgggattacaggcatgagccactcgtgcccagccacagctgcatttattaatgctacaagagacctacctctagttgctaaactattaggccctcttcagtcaattgatcacatcctcaattatacagctttttttttctttcccacacctttcttgcttccacagattaaatttaattgtccttttagagctgttaaaatagaaggatcatttccacctaacccccctgcccagttctgtgcaggataaatagcttaagaaaactcagcctgctgcatccaaatccccacactgcaccagcctggtcactatcacatggaccccattctagtgtgtcagtatctttccttaagggggccacacaataaaataaatgtttggttccatgagtggccccaccagtgccatggaggtcagtgctgtctcctccttgggaatttgtgttgctgtccccaagtgacaaccatccagcaggttcactctcagagctccaacctggccatggctacatttggaaaagaaattaaacatttctctaaatattggaaaagcagagcccgattgcccttttctcaactttgtttcttttaatctaaactgcaaacacaggtcacactttgtgaagagaaatctcatttgtgtctctgggcactgctttgggattcagaacttaggttcttaagatttatgacagactgatgctgtgaaatcagttgttcctggctgcaaatcatgaaatcagcaccgagttggccataaaaaatgaaagttttatggtaagtggtttaagaaaaatgcagaatatgagtcctttgtgatgtatatgttttagagcagcaattccctatttttaattttttttgaaaacattctccattgccatagtaggaaaacatcatgaagtaacttcattgaaaacagctatgtatatagaatagcatataatggttctgtcagacttattttcctactagctgaagcataaatgtaggatgatgattttttttcctgaggaattagattttattaaaatagttgctttgtatctcattcagccttgaagtcaaagcaatgggatcctacataaatgaaatttgttgatctagtgcaagctaatacagaaatcaatttcaatttcctttggatgtactattagtgtttatctgatggtggatttgtgttgttttaagtgatagctataacaaccaaaaatactgattagatactaggagccattcttgatctcaattcagaaagagtgtggcattatcctttttgtgtataatgaattggttctgtatcacagtttttaattgatcattcccaatattaagttcctccaaaagtttaataatctttttttctgtggcattcattatcagatgaggattgagataatccatccttatgatggccttccatgacttcagctaatgggactatgtgttttgtggaacatacctaaattgctagggttaaaacagctcatttggataattacagttggtctctcttaataggcctgtgatttcattctatgttcaattagacgaatacttaactatgacttcatgatgaagggataaaggcatggttttaaaccgaactcctctgagggactggaggccttttccctatgactagatcttgagagtgttaccagaggttcaaggtcacacagctgccctgaaacttgggatgttggctgttcaaatgtgtttgttcgtggcaggtgccacatcggcacaggtgacttagagtgtcactgacaatttgtggggcttctgcctatggtggtgtacatctctcggatccaactcactgcggcactggcatcactctgatttgactggtccccctggagtgaggcagtgcgtggcttatatgctgtacacagacagccatgctttcttgtcttcatatctccctccaccctactttttccctcgagcttgaatttgggaagccttttcgtacaggaaggacctgatggaggtcctgagtgacaaattccccaaacctacttcatgactctgggggccaaagggacctgaaattcagactaaaatacttgacatagaaacatctccctctttctcatatcccatctcacacctctccttgggccccttcccctccagctcatctccaggatgcagtgcatttgttctgccctgccccgagtgtcaccccccttcacttttatttcatttccctaaaatcaactctaggttcctcctgcttatagaagcatgggtatgttatcatggatgctaaacttgggttaacaacagctttaggatatatcatgtagcaaattcattcgcaggattgcatgggcacagctgttgtaaatgccaccttcattttaggatgatacggagtatttgaatacacagatcatccatttcaaacctccgcttagggttccctttattatatcttattgcttagtggatataaattagtgtatttttgccactgtggatgaattttcatgggcctgtgtttccaagaagggacaccaccttaggcattatttcatgaaataataataagcactactgttttttgaatacttaccaagtgtcaggtgctgaatgataagtttacaaaatattttctgacttatttttgcctcacatactaatataaggagggggtgatataatcttcatttatagatgaagcactggaagcttgtccacgtttgttctgacttctgcgtttagggtcttttgtctcacgttacaatccacgcccagcccttactgatatttccaggcattcagccatctatttgataattatccttctccatagaagcacagacaggagctgcttcttgactttgctgatggctctttctgtccatggatgtgagcccgagttgtgcctgtggcgtgatgacccacaaatgttggcctaggtcctcatgatgtgcacagggcagcctcccatgctttctagctgtcctgctgtggttttgcttcacttggttacagatgtcaaccagattgactgatgaagaaacatagtgaagatgacatttatgacttgtctgagagatccaggagaaaggtgggtgtttagcagcttactgatgtataaagacaaaattcgaaaaaaacaaaaaacaaaaaaaaacaactattaaaggaccccagtggagaataaccacatgcttaagttattgtgtgatctagatatggggaagtgtggacaaatttgagaaagggaagttgcccaggcagcattttttttttcctaaaatatgccctttgatatgtggctggtgggttcagtggttagtgtacagtgtgtactgtgtttgagtcctatgtagaccaagctgcttttctgtatcaagaccaaacttggacaaactctccatgagtgcacatggtcaggatctgtgttcagcaaaattttgttgtcagtaagactggccattgcctaagtccatttgggctgccataataaaatatctttgaccaggcgatttataaacaacagaagtttattgctcacagttccggaatctggtaggttcaaaatcaagggaccagcagatttgttgtctgatgagggctcattctctgcttcatagatagtgtcttctggctgtgttttcatatggtggaaggagtgaacaagctccctcaggcctcttttacatgggcactaataccattcatgaggtctctgcctttatgacctaatcatcttccaaaagcctgacctcccaaaaccactgcaccaagaattatgtttcaacatatgaatctgatgatgggggtgagcacaaatattcaggccatagcagctatcgtatctcataagattataataccctatttttactgtcccctctcctttaacttccctttgaggtgtttcttcatttggtgtcacaagaaacagatccactcacctattggggaggactcattacaggggattctgaggtcactgtctgaatctgaaatagtagtgttattgttcagtgcacattgaggacaattaaaaagaagcacataagacaaaatagaggggtaaagctggttgtaggagagcttacgtcaccatttacagtttgtgtactgcttattcccttatgattggactagccttgaatatattacttcactcttcttcttatgttctttctcattttgtaacagcaaacataaaccctgagctttatgttagtcattcataccttttatgcatgcattttagattcaaatgcccagccctattttctaagagtagatagacattatttcttccttgatatctaatggatgacagagaattattttttaaaggtagcttctccctttcgtaaacaaatagatttttccatgtcacaattacctgaggaatcagatgggcaagtgtgtataatagaaatgaaactcttttttcctgtctgtgaaattcatgccagtactacactctatacttcatttctgacatcagatatggagtatttttcataccaggtatttcttcagtttcctgcaattaaactcaattctggtgctagctaactggtgacaacatcagatcctgtaggttaagggctccgtctgaaaaggctgcccctatttcagatgccagttccaagtccagtgctgtctgattgactgtctatcagaggtccacataatcttctccccaggtttaataattgttagaatggctcacatcacgcaagaaaagtttacttaccagattactggtttattataaaaggatacaactcaggaacagccagatggaagagatgccaaggcaagatatgagggatgggtgcagagctgtcatgccctctctaggtgcaccatcctcccagcacctctaagtgttcagcaacctggcagctccctgaactccatcctttgggttttatggaggtctcattacataggcatgataggttaaatccctggccattggtgatgggacaggggattgaaagttccaaccctctaatcaaatgtgttcaaatacttgattcccatggcaaccagtctctatccttagagaccttccaaaagttactcattaacataaactcaggtaaggatgaaagggacttattataaacagcaaaagacactcctttcacttttattgtttgtattacttaggaaattctgggcgctttaggggttctctatataatgttttggccaatgagggactccatatatgatagcggtggtcctataagattacaataccctatttttactgtatctttttatttttagatataaaagtactactgttttacaactgcctacaattttcagttgaataacatgctagacatgtttgtagcctacaagcagtaggctacaccatagagcctaggcaagtagtaggctgtaccatctaggtttgtgtaagtacactctatgatgttcacacaaaaacaaaataacctaacaacagatttcttagaacttattccccattgttaagcaatgcatgcctgtatatatttctttgtctctctctctctttttttttctttgtttttttttttttttttaagagatagagtcttgctttgttgttcaggctggtcttgaactcctggcctcaagcaatcttcctgccttggtctcccaaagtggtaggattgtaggtgtaagccactgcactggtctatattcattattataaatcagtattacaataatcaacattgtgggtgttttttcatcatcactttctatgccctcatgtctctggattcatctaggaatccaggtgtaagccaaacagtttgtggcatttatcagtttctcatcaaacaaatgagaacctgttcccatttgaaaaagcagacggaaaagggaaagttttctgggccatgatgaaaagtgttctctttcttcagagaaagccacaagaagagatgttttcactcttctcctgggcattgtcatgtggccacaaggcttggaaccactgcagctattttgttgttatccagaggaagatgaagctcacataaggaaatcacagagaattccagggatccaaaactggagctactaggtagagttcattcccaaagcttgctctacctttgtactttttattctgtcagccaataaagattctcattctttatgctaggttgaattggacattatcttacttttagccaaattcctctcagttaacacagtgcagaagcagacgtagaatgattgtgttcctggtgtttgttttgttttgttttgttttgtttttatgggccagaatctcgctctgtcgtccaggctggagtgcagtggtatgatctcggctcactgaaacctccatctcccaggttcaagtgattctcctgcctcggcctcccaagtagctgggatgacaggcatgcactaccatcccccgctaatttttttgtatttttagtagagacagggtttcaccatgttggccaggctggtctcttgatctcagtctgaagtcctgacctcaggtgatccaccctcctcagtctcccagagtattatgattacaggtgtgagccaccacacccggcctgttcctggtgtttgaatccattctgatcatccagctcagtcacagtggttcagagcgtcacctctgagactgcctgtgatggtacggcattcatacatacatgcctcaggtcatcttcccactgatcaggcaaggcactgtccttcttaggcaatttctactgtccagtgtaaaccaaatataaaattataagtttctcaatcagctgggtggacccctcttcaggtcccagagaacccaaagaaaacttgagaaactattttaggcaatgatgggaaggaggggtcagacatgtttcattatactttcctcctcttggaggttagacacaattgaccaacattaacattaaaagagagaccttaagaatgacaaaagaggctctttgtggcaataagatcccaaattccaacctgacactggtatagcatcacatgacagacagcaggccccgcaggaaatcaaagtattttaccccaaaatatatttctttgacatattttagaaaggccctgcacagctgtctcttatggaagaaatttgcattctgtagagaatctccttcccttactagttttttttccagagagtctggcaccttttaaaggtctaaatagaaatcatctgccatctattgcctctaagggtggccacctatgagattttatctacataataagacccttggtctccacaaccccttatcttaagccagacagtcatttctatcaattccaggtctttagataataacttaactctttcaaccaattgcaaatcttggcaagaaaatctttgactctacctgtgaactgtaagccctcacttcaagttgtcctacctttctggaccaaaccaatgtatacgtcacatgtattgattaacatcgtaagtctctctaaaacatgtaaaaccaagctgtaacccaaccactttgccacatgttcccaggacctcctgaggctatgttacaggtcatcgtcctcatatttgacttggaataaatctcttcaaatattttacagaatttgggttttgtttgtttgtttgtttgtttgtttttttttttttttttttttttttttttttttttttttttttgttaacactagttttggcagctctacttagaaattgtaacctctttccccacccttctccttcttcatctcccatacccagtcctgacttgggccaggagtgagtggctgacttagaggtaatctgggctgagcaatcagattatctgattgtgaatctgatacagaaattatcagtgagcatgttaactggaatgttggatggattgcaagcttggagtggccatttttgtgccatgtgcagagtaaagaaaacttctgggcagaaacaaagtgggacacagtcttggagtccaaagcatcccggaaagccagaccttctgcccttggttcaggtctcacatgaggaatggcccctaccttcctgcccttgagttccaatgtcacttcgttagatagcttgggatggcttctacttcctataaccaaacaaccttgactgacccaaaaaggggtcgtgttcatctcaacttacacatgatgcaatcaaagatgagaaaggttcaccaaagctgatttgtagccagctgggattcagcctagtttttctaactttatcatgtttattttttccatttcacttgctggttaagtgaccaagaaagatcaattcatctactttattcctaaaatattctgtgactgttgcctgtcagatatcagagaaaagagaattactctttagttgcttcgtgacatccttgatggattatgaactgccaccctgaaaattcagtaggaacctgggtaatggtaactgtaggtctgcatacctaagtaataaaatacagagtatcttctttaaattattgaggactctggccttggtagtgttgcaaaaattgtgaattattgtgaaataaatgtctgctgaggtgcacagcagagtgctcttccacaaagttgcccatgtgagaagcaatcccaccgaaaaagagcagatgccccctggaagtgtcgatttgagactcatttgaagacactacttgttttctctgtcatggcattttaatacttatggcctgtctcttctacatgcaaagcttctaaaccttccatcttatctcaattgcagctgctctggagaataactgccctcttttgtggcattcccccttctatcagtcccccaaattaattttagcatatgacacatagcctccaaatttaatgaaaatccactcagccattatctgtgatgtgacagacagactaaaacttaattatattgacatggatttgaggtaatgctatcatattttgctagaaaaggcatctctttatgagtgatgacaattagcagtcagattttggaaacacagccatggagaaatatctgcacagcaaaatatcatccatacctttaggacacccactaagttagggattgaatgccatattcattcactcaggcaatcccacctagactttgggttaatagctttgaagaagtatttcattacatgtcagaacaaggaaagatttctcataatattaagtgttgtccttgtaggaggctatatctagttcttttgatcttcaaagtactatagaagtggtaaataaaatatgtgttagctagtatcactactttgactaagtagatttttacaatcttcctgcaccctcatgcccaaataaaggatactaatagactcactatttgtttttttttttgagatggcatctcactctgtcgcccaggctggaatgcagtggcaccatcttggctcactgcaacctccacctccctggttcaagcaattctcctgcctcagcctcccaaggtacgcaccagcatgcccagctaatttttgtatttttagtagacacagggttttgccatgttggccaggctggtctcaaactcctgacctcaagtgatccacctgccttggcctcccaaactacagggattacaggtctcactatactttaagggaaatattgcatatagaggaagcacaaatgttagaaggtattaatcttcgtagaacctttcccccaccctaacacctctaattctttttggtggcttctaggaaaagtgctttagttaatatttcactaatctttcattatactcttataatcttcctttgggaagggttcttttactcatgacctctcaaaggtaaagcagggatcttgtcattttgaatgctggattgatgctatcaagagtttttcggctgataaagtcttacagaagagattaccacaggcaaagtctcaggcaagagggtgaggaatggatgataggagttgaattggaggatactgctgcagttgagaggagcaggattgagtatgtagatcagaggggaaataaaaggaatgaagaaagacgacacagtactgagaaatattatgaagacaggggaatggttaatataatatttcttctattccaaaagttggcagatttttttttttttggtatgtgctagcttgtaaatatttttagttttgtaggccagtttcagtcacaactatttaactcagccataaagatccataaacaataacaaataaatgggtgtggctgtgtctgataaatatttacttaccaaagaaaggtgattgctgatttggcctgcaggctatctaatcacttgtttataaaatttgcactacattcgttgatatatggtatgcctgatgccaaacccaattcttatgtttattaaaatttagaatgaactagtattctgaagattagtaactccctttttaagctttgtgatttttttcatatttgtccattgttactttaataatattttaaatgttcaaatatgcatatatgaaagtaagtttgtttagtacatagagttaagcttaacacacttcttccccataaaagagggatttccataattaactctaggaaccataaaccctgaaaacaacactgcaattctgtgtgaatggagagcctgacactgtactaaacactctaggagatttttccaagtattcgggctgtttctgctcttgaaggaactatcaatcactgcaaacactaataacagtagatgccagtcaaggccaagtgtggggctgcctggctggtgagtggcacagatactgactgaggaagttgtgggaagcaggagagaacaagtggctgctggctcctttgtgtcagttgggagagtcctttggttgcaggaaacagagactcacacaggttaattcagggagtgaaagtttattagaagaagattgggatcactcccatttgcctgagcctcatgaaaacccagaggagccctgcccccaccttaggggagaattacagacacagtccagtgaagaatcaagtacctggtgttagtctcttgatcaccccacttaccttagggtcgcaccataaatgcacatcagtggcttcctgtgtttctactgcttctctgattttttcaaaatttttattttaagttcaggggtacgtgaggtttgttacataagtaaacttgtgtcatgggggtttgttatacagattatttcatcacccaggtatgaagcccagtactcaatagttattttgtctgctgctctcccttttcccaccctccaccctccagtagaccccaatgtctgttgtttccttctttgtgttcatgagttcttatcatttagctcccacttataagtgagaacatgcagtatttggttttctgttcctgcattagtttgctagggataatggcctccagctctatccatgttctctcaaaagacatgatcttgttcttttttatggctgtgtagtattccatggtttatatgtaccacattttctttatctggtctgtcactgatgggcatataggttgattccatgtctgtgctattgtgaatagtacttcactgaacatttgtgtgcaagtgtctttatggtagagtgatttgtattcctctgagtatatacccattaatgggattgctcgttcggatgatggcaatcccactttctgtatcttgcactgaagttctcaagagagttgacgttattggtcaaatcagtgcagtgcagtgagggagatgggtggtctcttccaaagagtcatactgttacttagccttttttccatcttgtgccttctcattacttagtgccttgtagtcctccctatcctgcttgcaaatgaagactcaggcagcagtctgtcacaagggatactgggaaatgtaatctactagtgtgtgcaggaggaaaggaaaatggattcagtgaacaactagtcagtctaaaaatacagtaaagtaggcctatagattattgtctgtttgcacaagtgaacttgaacttgcttttatttatctgtcaaggagccttatgtctgtgaaatcactaggataagtgaaatagttttcctgggctcattcccaaaaaggaaaacattgtggctaatcagacacagagaatccacaatggtggtaggcttctcctcactattaaatgtgagatggcaccaatttataggctccatggactttttcactacaaaagagaaggaagctttttcaaacctctgttttaagagggaaagcaaagagaaggaagctttttcaaacctctgttttaagagagaaagcagtaacatattgaaagaaatgcacagttttcatttgtgtcatctcaacagctggtactaccctgaaatttcaaggatcccttcccattgtcagtccatgtaacctcatccttagatcagaaaacacagccacaaagacatgagttcagaataagtgtcttacaagtcatacaagagaaggaatattctatatgattgagtcaagcatatggagacactggtcccagccctgctaatatccaatgtggttaccttggatatgttactaaatgtctgcatttttgctaaaaaattgaataatgtgtttgttcaaaatacatacagtacccaaattacaatggttcaatgcatgatattttgactttaggatgggtttatcagggtattaaatgtattttcaatgtagaatattttcaacttacgatgggtgtattaggatgtgtctcattgtaagttgaggagcatctatacataggtgtaaggaaacctaaagactgactgttgtgttttctcagtggtggttcttggcaatagtagtaggagaggtactcttgttccttttttgttaccattgttaactccaaaatgtgccaggccttcacagtggaaggggctagtgagactggatgccagaggaagcacctgtggaacagacacctgcatagccctaccctgggcaacaagactttaaatacctcctccaactacaaggttctaaggatctgcattgatgtttcataggcatgagttcttaaaattctgtcctgaatatgaaactcaggattgggaaatgaagcaagaaaatgaaaggatttgctttatgaagactctatatcctgggcaaagtggtggtgggttgagttggtcttcaacctgcccttcattgaagggctgcctggaccctctcctaaggtgctcattctggatacccagttggtgacaactcttcttggtccagcaccttctctaagttgacacttctttttcttgctccccctagccactcccctgacgtgtctcttaaagctacatttaggtatctgtgccgtccaaggacaagctttaaggaatgagcatacctcatctagaggaaggaactggtaagactccctcccctggctccagcactgttctggactgtaatagtgcattctcacaaggagaatccagaaataaaagtccatttatgactctgtgacctcaaggaatgactttactcaagatcatttgaggctccagggcaaggggaatggcggcatggcaggcaaggaggggctgacagcacgttgtgcagtcgagttcatgtagccacttcctgcacagaaagacttccactctgcagttgtaaagagctggccttgacagggagttgctggttccccaggagttaattgatataagaaataacattacaaggaattaattagaagcccttgagtcttgacaagagtttgttacaggctgatgtgcctttttattatgaagctgggaaagggaatgaggaggagaagtacggaggatgttaaccatgcagatgtgaaagagattttgtagacagcctgcagagaggcccctgcataatgatagctcactcagagaaaataagaacatgaaacagttcctgacaagtcccatagcttaactggaagaaagtgaacctctttgcttatgaaacatcctgaagctagcgtaaaagttaaagagcactttgctctgaaagagaaatagagggatggaatgggggaagggacatagtcattagggtaagtaaagtaaaactggcttccccacaggacatcaacacggtagaaacatccggaattgtctctaagtctcactcctgggaattcacgccacagggataaatcagatcaattactaccggccacctagtggcagaatggggaacaacatgctgatctgtcggctgggaggcttaatatagtccgtattcacaatagaagctaattgttataaaaatgttaagagggggcgtaaaatatttcagagcaggggaagatttttagcctgaagacaacataatttttcacttaaacaattcatccagctcaggattagatgaagttgagtatgaggataattgaatatagtaaccaattctacgtcttccatccatgtgtgtatttaaagattacaattattatgctatttttaagacgtctgttctagataaagttcttccatgagatactacttttgatgtactctgaagagtgctctcatgctgggagaatttcagtgctgaaaatagcttttggcctagagttgagacctgggtaaccacccccagcttagctatgcgaaacttgggtgattgtcagaaagtcatttacgtatcatgtggggatgtttgtgtatgtgtgtggggagtgtgtttgtgattgtatgtagtgtgtgggcatatgtataaatatatttgttaagttgaagcaaatacaatagcccccctcttatccacggggaatacgttccaagccccgcagtggaggtctaatagtacactgttttttttctatacactatttttttctatacatacctatgacaaagtttaatttataaatcgggtacagtaaaagatgaacaacaataactaataataaaatagaatagttatggcctggcgtggtggctcacatctgtaatcccagcactttgggaggctgaggtgggtggatcacctgaggtcaggagttcgagaccagcctggccaacatggtgaaaccccgtctttactaaaaatacaaaaattagccaggcgtgatggcatgtgcctgtaattccagctactcgggaggctgaggcaggagaatcgtttgaacctgggaggcagaagttgcagtgagccgagatcgctccattgcactccagcctgggcaacaagagcaagactccatctcaaaaaaaaaaacaaaaaacaaaacaaaacaaaacaaagtcataacaatatactgtaataaaagctgtgtgaatgtttatttctgaaattttccatttcatgtcattgaaccatggttgcccacagttagctgaaactctggaaagtgaaagcgtgcataagtggggactaccatatgggcatcctacatacctcttaggtggtactcagagaacccagcaatgagtattgaacaccctcagtgagctgagttctggttcatcccaatggaaggtattagagaaggatgaacaaagtccctgtccaatctaagtggtgactctaagacacacatgaaataatgatcaacaacataagtcatcacttggccttggctttaggatatcttagagaatacacaaaataacttgaactcaacccagatttgagaacttctatggtgttaatgctagtaccctgtgtttcccctgcaacactcaatctttaatgtttccacggaaattgcttgctattcctgcctccagccatctccacagatatgtgcaccgtagtcccactccttctcaccagattacttgctcaaattatctctcgagtatagccctgtgaaacccacccaatctctttggctcccatggtacattaacatatattcgtactcattttgtgtccaaatctttgtttctctttccttcccacacagcattaataaccccgggaaaaaaattctctctgttacatgattctgttttttttgctccttcatcattaataccatagtgtaatttataggtatagaggcaagaagatctcatatgggaatgtaagatcattaaaatcttcactgtggagccaaggttcaacctgggtttttaggaagagacaggatttaactgtttgagggagttaacatataatgtaaaacatggatgtgttgggtacattttctgaagtagcatcagggtatgtatattcaggaatttgccctttactttacatgtgaatatagttagaactctgaggctgggtggcattttaggagccagacaggtccatgaatgcccttcccactgccctaaattccctgagttcaattgacaaggttggaaaaatggggaagttagcatggaagtcggctgccaattcaggcaggtgaaggagttctaattcggtcaggacacccactttgtcctattcaatctgccttcacatttaaagggccagttgtaaaagtatcccatcttcacaaattcatatctaaccaactggaaattattttcactgcaaatgtgattgattttatggagtccttttttttttaatcaggagtacttctaatgcactgcagtatttgtttactcagtgaccaggaaaattgagacatataggttaaacaaaaacttcatcaaacaattttggaagtttctttgtaaatggtaagtagagtcagttgagggaggaaggaggaggagctactagatggcacagtgattctattactttaaagcattttaggaacatttctgttttataaattaagattcatctggggcctagatatatatattcattatgagctatacaggtccatgaacacccttcttacattcctgtatataaaatgccatatatatctatacatctgtatctccatctatctatcaatgcatctattatatctatctatctatctatctatctatctatctatctatcatctttgttatatttaggcctatacataatttctattttataagataaattcatctgtatagggcatttaactaactctaggttaatgatattctgagattatctgattatatggcagttggatctagaagtcagtcccaagcactgagcctaaggataaggttaactttgctgtagattaatgccagatattcttcaagaatcaaaactactttagtataatctattgatgatagttaaatattttgctattcaagtcctattagttaccgactcaagactcctttttttccaagagaggttgttgatttaataactgtcagccaaagaagttcatcagcagctgaaatccacagcaagttaactcataatgaatcttaaattttagaaagaatgttttagcaatattgagtgacaaaagaaaaacagttgaaaacaaaatcaccgtgaaacttccgtcagctcattagattctctgaattccataaaagagagaaataataccaagtacaactgagactggagaagattttatggtggaaatctctcagattcctttattccaggaaaataattctgaacttgagaattgagtgttttctctcatggacattggattgaaaggctattgtatccaaggatgttcactgtggcataactcttgctgtttgcacaacctgaaaatgatccaaagctcagagttataattaaggaccttgttacaccataaaagattttcaaattttaatctatgacaacccacacagcactcagggcttaaatactttattgaccaggctggcaggctgactcctctgttggagctgggagagtcctgcttcaatttatctctcccacactacatatttgtagtcataaatcttttgctaggctctttgagcattaaaaatagcctggcattgctggctttccttgtggtactgtaagagccaaatcaaaggtgccagcctcctgtgatctttccattttgcgctgcagcaggaaacgtttacatctgtcccagccctcactgtctaagtgtcaactcaaacaatggcatttcccactcagagtttggctccatctccccagatgcctcccttatccagatagggcagctgaacagcagtctggcccgagctgttcctctgccagcctgggtctgttctctcttcttgatggtaactctgggtggtgtgttttcttcattctgcagggatcctgctagatggagcagaatagctatgctgccaccagggtccaggctatgggttttcactaggaccactggaggagagaggcggagggagcagcaaagggccagaaacagtttctggaggtgcaaaacagaagtcatttgaacacaggcccaaatgcagatcagaactaggtcaagagctagagggtgactccacaagtatcggtcaggttgtttagagaagagaccaacatgttcagatagaatgctattttatgaatttccttcttcagacatgagcatgttatttggtttaaatttttatttcagtagtgagtagtaagaaacattatgggggtcatcccacagacactaagggggaattcctgtgtcttcctttttcttctaagctgtttttcacatcttttgtaaaatcagctttattgggatataattgttatctaataaactgcacatatttaaaataaacaatttgataagctttttatttgatggtttccacgagataatcatttccatcaagatgatgaaaagatccatgacgccctaatatttccttgggctatttgcacccccttcacatcccactctcatctccaggcaacgactgatctgttttctgttagtatatattagtttgtattttctagacttttatataaatggcatcaaacaatatgcactctttttgttttagcttctttctgtcaacaggattattttgggatttatctacattgcatcgtgtatcgatggtgatggatgctgagcagcattccattgtgtggatatactacagtttgtttatccattcacctggataatggacatttgagttgtttccagcttggaactataacaaataaagttgctaggggcatttgtgtacaagtttttgcatgccttcatttcccttggttaaatatgtaggagtagaatagctactcttgggtaggtacctagaataggtttatatgaaagagtatgtttgactttttaaggaacaaccaaacccttttccaaagaggctgtaccattttatattcccactgactgagagtcccaattcctccacatcctggctggcttttgctgcagtttctactaggggacatcaatgcagcagcctgcagggccatctgcatcaaacgtggcctcatctctggccacacatcaaagagtcaaggttttggctggacgaagaagaaaaacacagaccaagggatattaatgacctaacatgaagagaaactatctattttgtgagcttacaaataactaaagaagaacttttgcagtatagtgtttgtcagaaccgtggtgtaataaattaatgtggatcaaaatttctggccattattataaaggaagaaaggaaagtacatatgctttgtctttctttttacagaatccagtacatgttatttgtagattgactaacatgtgatgttcagagatagaaaaatctaccttagacgattcttaacaaagagaaaagtggttctgaccatagtcatttagcccaaatgcctagagcagaattcccttctaccttttctcagaacacaagtgcccataggctcactacctcctggggaagcctggttctagtcaagcgttttgttcatggagcagatttttatttaaggaattcataactactggcctgggcacgtgaagtaacttagactcagatggtccacataacactgctcaaacagaacaagtccacagtataaggaagctaagtcaggcttcagacaatagcacctcttttgttaggttagtgcaaaagtaattgtgggttttgccattaaaagtaacgtcaagaaaccacaattatttttgcatcaaccgaatacttctctcatttcgtacatcttaaaatcatataaccaggcagtatcttagggtcattgggatctcggctctggggcttacttatcccagatctaaccatcctcagcatggtgctcagagagaaatattgtgagtttctgtagtcatttccatatcacacatctcaacagagaaatacgaaaatccacatggaaaatctagcagacctacaagcgagagccaggtgggagactcttcacctgccccaaaaactagtttatgtgcatgtgacaaagcgggcgtttttattgttcagacactaaaacaaacagaaaattatgaagtgcacaaaaggattttccacgctgctgaaccttgcaaagtgttcacagtcgagttcccctttttgaattcattatctcaaggcagcatttggtttggaaagccggggcagctgagctgaaaatgtgtattgttattacttgaagtttctgagaataacctgcacaggctgcagtgttcagaaccagctttgttctttgcaaattctttgtcagtgaactctctcttattcgagtcattggcaaacatgagagcctatgtaaaatattgatttagggcatattcctaatcatttgttttactagcatgtattttggaaagctacctgtagctgaagtggttattagtactttccctaaaattgtatcactttcattttcacattctttgctttgaaatattttaaccagggggtgaatatttagatcacattcacaacgagtctttatataaccagtcttctattaggttattttccttatagtcccacagatacatcaatttcacttctgccttctatgcctttcctcacatatttttcttgctttttcccatcccattcctgcttgtcattcagtgtgtacattcctgccccttctctaagactcatgaaaccatcaaagcctatagggacctctctttcccctgactccctatgacaactgttttctgtcctattaatctgacagctaatgaggtggtacttcatgacatctcttttatttttaattttgaacaaccatttaaaactgtgattatgatttaactttttttttttttttttttttttttttttgcactctgtagcccaggctggagtgcagtggctcaatctcggctcactgcaagctctgccttccggattcacgccattctcctgcctcagccttccgagtagctgggactacaggtgcccaccaccacacccggctaattttttgtatttttagtagagacggggtgtcaccgtgttagccaggacggtctcgatctcctgacctcgtgatccgcccgcctgggcctcctgaagtgctgggattataggcgagatccaccatgcttggcctatgatttaactttttacctgtttatatcttgcctctctaagtagattgggcactccttcagatagagggctacctgtttcccacatttagtgcccatcccagcatcaaatgcttgctgatttcaagacccagtttgtgaatggtctcacaagaatttatttaatggggctgggaagtgagggagttattgaaagcagaaataaattgctgttaattgctactgtttgcaatttgctattggaagtagcaaggtaaatgttagtgcacatacaattgtattgattggattgtctttttcaaggttattgttgcaattaaattgaccttttgctggtacagaaataacttgtttaatgaaaactgaacaaatgaattgggcataacttgaatatagaaaataatcagagcattggatgtaggtctttgtcaaatcactacaaaggccaagtatggacctgttcagtagttgcgctcaaatgaataaatagctcttaggaagccaaaaccaaaaactagatggtggtgatgatgtcataataccacaaacaggacatgtcataaatttgatgttgctctctacagctcactgagcattgaaggatcctcttgggtgcattaggcatgatgctagatctagaatcactttgcaagaagtaagcactgtgcaaaggaaaggattactcaggcaccacttctggcatctgcacatattccctagccttagctccaggccacttacattaactggttaattgcagaacctctgagaccctgagacactagattgtctaagataagaatcaaggcctatggtaccttagtatgtccttggaaatacaattccacttatctctgcccaggatcttacattccaaatgggaaatatttcactgaatacttcggatctttggtgaccatctcctccttgatagaatgtcgtttagtgagttttatactgtgcccagcaccataaggcaatgaagaagtagtaaaaatgagaaagaaccaatataaaggggcacattgcaagggaaggatggagaaagctttaagatcttgatgacattcgaaagctcttctaaagctgcagacagttcaaataatgaagatgagaatgaggtgcataagctgatccctgctgatgtccaataggcacaagaacattaaattgggaagctttggactccctgttgccaatagcactcataataactgtgtttgctgtaccgctttgaccagtacttttaaacctctctttcctggcctatgaaaggagaagattggagcaattaacctctcagacatcttaaagccttaccattctctgtaatcaattattccagacctcctgtgtgaacctccccaacctgactaacttggaactgactgctgaccaccacttacagaccttaaaggatgtcagtgagccagaccggtagcttatctccaacaagtctatccttttggatggaggagatagtgccacgtcttctgcttttctctctctctcttttgtttacttttcctaatcagaatcttctacctcctcaaaccttgtttttccattcttcctttttagaattctctgtgctatctttcttgggttgtttacgtccaactttcagatcccttctgaatgaatttttttttggcacgtacaaaacactcacccataagcatctgtaacttagattatgtaggtggatatccaggatttaataaggcctgaagtctgaaggaaaatgaaattagaggaactaaatagattcttatattggttggataccagaaacccagaataaatatcccaagtggccttagtctgcaggttattgaaatctagaatttcttactgaagcaatctgcatgttagaattctaaaagcctttaaaattggtacctctatcatttgtcttttctttatttttttttttttgtgggggcaggggactcatttttctggactttgaactacataatcgaaactgtggctatgcttgtgccctatctctttgaggtttggactaactaatgggtgtccctgtctgcctttattatttaagaaactctctcaccattcctgtcatagcctcttttatgcctggcctactgagcagaggttcatccttcagtcggttagcaagcttttgtcaagatagatggaattttagacttagtctgaagtgcggtccctctccatctgctttggaaacagctcacaaattcttcttgttgtttcagatgtgatcatcaatctcctgccagaggaaattaagaactgttatttgtctgttgggcaggagagattccagagttttgacccctaattcattccctactctttgtgctttggctgtaacatctaactaagggtttgcagggtcttcttttatttctccagattcgttgcattaaaaattgttttatcccattagtgtgtcatttcatcatagttattaaaaacaaactcagccactttgtagcccagttttgtctgccgtcttccaaccactgtgctgcttccccggagagtctgtctctcagcagctgctggttggatcattgaggccttaacccaggagaggtgccatctctctcagaggtgctggctgtaattggctggtccctttgccactgtgggtggtagcaaatatgtctctaggacataaaatattggtcctcagaatgtagagagagaaatggctaaaggcccagtttagtagtgaagcaatgaactttaattattttttaattattcagtaagttaagaaaatgtttgaactttggatcttactaccattgctactgatgaggaataagggaggtgaaggaatattgtttgataaaagtggaaatccatatcatttacatgctgaacatggtgattgcacggtcaggtggcagagcctgatttacttttctaatcagggttttagtagaaagagcctgcagtgcccttctctcctccatcatcagcaggctcttccagaagaaaaggtgatgatgtggtttcatttccacagcatgcttttatttctacagagagtaacctggaaggcaaggcaaaccaaaacacaaagaaagggccagagtccatgtttgacactgtttttctccttttatttatccttcctctgaccattatgatagagttctaaagaacctgcaggagcattgagaccagctcctcgtcgcatagggcattcaggtggattactcaacatcactgagctttttattgatagttggagagccaggattcaggcctccttacttcccttccaagctttgtccccaatattgctttgcgaagggagctcttagggaatgaatcaaagacactggcatactgtttaccaagctgttaatagtgtaatcattgtaaccacttattgagcatgtactttgtgcctggaactttcctaaagctggaagatagttttaacttaatcttcaccaacaaactactattattatattaattaaaaaagaagaagacattgaggcacagtgggtttgataggtggctcacggtcacacagttggtgcttcgtggattaggaactcaagtcctgttctgcgggattctaagatacatatttaaaactattacattcagctgcctgtcaacatcctggcatgttacacattgttgtgatccatatgcgtgcaatttcatagcctgctttatttcactaagcatcccatgttatgaaaaaccatagcatacctgttattaaaaattcttcatcattattatgtttatagcttaataatgttacttctgatatcttgcttcatgttatttgttttttatattttcttaatgttttctttctgttctttttctattattttctgaagcaatttgcaacttacatttaactgattatgagtcgaaagaattgaaccatgttccagcccctcctcccatatatacaagatggaatcatttgcttcttgtttctttgcctcgccccctttcttaggccctgtgtctttaacttgaagctcaaagcactttttacaactatattatttctgacacgatacacacacacatttgtagatagatacatggatggggggagagagagagagagagagagagtgtgtgtgtgtgtgtgtgtgtgtgtgtgtcttgaaataagttggtgacatgttaatttgaatgactatagggaatccacatggagatgcccaggagatcagcagctcaggggtcaagtctggctcacagatattcctttaggagttattagcatataaccaggaattattagcatatgatccatataagtctgcagagatgtttcagggagtaaacgcaaagatagaagagaagcaggctgaggatgggagtccagtgaagaccaacattttagagacctgtgatagtgaatgagaaaaaggagtcagagaagtcagaagaaaattaagagaaaggggctccattcaatggagcagagggttccaggaaggtggaatgttttagagaacacacttggagactgccctctggatctgatgctatgggccagtggagaggttagtaagtgtcattccattgggataatgagcatgcaggacacagggctgtggctgaggagaaaataaaaggttcagaggcagcctgcttcctctgtctatgctgaacttctagttctggctctagcactaacatttagtgactttgggcaatactttatcttctgaacctaagtttcctaagctatacaatttagggaaatggattacagttgtctaaatacactccaattctagtgctatgcatactatgatattggtaggtattaaactctccccagacacccaatacaaatacttcaaggggaaaaattaactctagagtagtcatcaacttatgggctaaatgagtcttaagggagtcttaagggaggtctgaccttctgaatattgctgttgttatctgtaccatttttatactttaattttagtcatgagtgattagtgtacccttttaatatctcctcaatggtgtttcttcccacacgtttatggacaattttaagtaagtccttagtagcactgatgcagggcttattagaacccacatcttggtgtccatctagtccatgtgccaactacgtccggcacccggcatgttccttaaactttacatattgttttctccttctttgagatgccatttgttaaataatgatattgaaagcaataatcaaattggtaccatatagtgagtttgctcaaataatcagtcttgacattcattcttggtttggtgttctaccactgcaatcactggcctctgttcagaggcccccaccaacttcccagtttgaaaaatggaaatccatacgaagagggggacctgaatgaaaccctcttaaactgtgtaatgaaaaagaaggctctagcaggctcccatggaaccagtaagggtgatgactcccattacattataaagaaagccaaccaaaccaaagatcctaactttctacaggtgatataacttctcctaagtctagccacgatctgatccatttggctctggctctctttgttattggatgattgctcatttctgaattgttggaaggctagaaacaaaaataggaaaaagaaaatggcagacagcaaaacctgctttgggccccatattaatccagttacctgagaagtactacctacaaatacttaattaagagtcattggagctaacgccttttcctctttctggtggagtctagccaacttttaccagaaaattgccttcacattttgaaatccctgttctagtaataaacttgtagacaaaatgtcagcgttttaaatggctgcagttttagttattttaattaattttcagtcaaaagaagttgatttaatccacattattgcttgcaaattgttaaattttgtttgtataataaacttttaaaactttctagagtcaattcctctgggcaagcttcagcatgttgcttagacctctattataatacttaaaacatcctattagatattacggtaagttatttacatctctctgtgcctcactattttgggagctcttgaaggaaaaggatgaagtcttatttatttatttactgaccctcttaatatctggaacagaaccttgcacatagttactgctcaataaatattttctggattactaaactctgaggagggcttagaattaagaagataatttaaatacttacccgtttggttatatgcctaattctttatgcctttacttttctgtttagtggcaccatttattccttgctttgtgaggtgttagctagaatctttgctgtgtaatgcttagttctttagaaattcaaagttcttggctcagcctcttgggttgtcctgccttttatagatgcagtaaatttgatcaccatcaagggctgttaaacaacatgcagtgataaaaatagttccctttgctgacattaggtgttttctaaaacagctcgataaattctggtcaacagaaactctttgtgatttcaaaagtcagaaagtgaactgttgacatggatctgggcagatggaaaataaattgccctgtagttgctcagaaatatgtcctaggtgctttttaccatgactagtggttgactgtgccttcactcgatgatgttataatagaagttatgcaagctcacgaggttacaagaggacttgtaggcggcgacttgtttgcaaggtgatgtatctgcaggaggcgtaatgggtagggtgagtgggagtggtaagttggtgagttttgcaaagagcattgattttaaatttcatttatcaggttcttgggaagggggatggtgatattggtaactgcaacaaagaaaccctggctctaaagtaaggccaggaagcagtagtagcagatgtagatctgttttcccccttactttctactccagtccttcctgcatttagcaaacttcactcctcaaactatactttcacatcaccattatctttattgcctattatattaaccctaacccaaaacaagtggaaaagtacaccaaactggaagtacagaggccaggtacctggttcctttctgtgtctacccagccaggtaaagttgagcaagtttcataacctttctggagccattgtctcttcttgagaagaatcagtttgcactatatgatatctaagtacattttactaagacatctcaattaattttcaagcccttctatttctcatgaccaccctgactttttagacttgtttcctattagttctaaaacagggtatgtccagatacacaactttgtacctgcataatagttcttaaaataacttttgaacctttgtggtggagcctcgactctctagttctatgctctctcatcttgcctgtcctcatcttccttaccttgcaggccctaggaaggattgagctgcattccaatctacctgctgttcttttgcactggcttggttttaatgtgtatctccttcacctctcatgctccccaatctgctctcttcaacctttctttttttgcaaacttcctcaatcaaaatctcttctttcaagatttgattcattatcatctctttgaggacacagtataagagtgatagattctggaagcatcattgtagattgaatttactaaagcactttaatgataatcaagaattataggattctagtcccagatctgccacaaacaacaaggccattagccactttgggcctctttctcctacttttgaataatggcatggagatagggttgggggttgaagtttatcagagaatgtatattctcaaacattttcatgggaaggtagagcatataaataagtaagataggtctggggtaagatcatagagagtgctgaagaaaagaggcattccattatttttttaagtaatttgcatgccaagccaaacatgcttgccagttgaattcaaatcctaggcctctggtatacaggttatgaatttaggggccattgtagtgccttttcaatccaatatgcatatttgttcttcaactctatctatatctctattagattacattacaatattgtatgttaacagcaattctttataagtttttttcttaacctgtttcatctgttttgactcttgactcatatattatgtgcattctttattcattttataagcccctataacacctaccacatgcttctgcccacattgattctcagaaaaagcttgctgaaatttgcattgaagagggctagaaactaaaagttgggaagactgtagaaaaaataagaaagaaaggatggaggaaaagtatttgaaacagaataagaaaccactgtaaaagtgtagccaaggtatggggggagctggttcaggaactctgcacaggtctggccctttgaaccacatcagaacacaggtttccagagctaagctgagctaagggtcgactgacctagtgtttcccaaattgtgcagcctaggaagaagacagatgagcacctttatattatcatagctggtcgttttgatatacattggaaaagttgctttgtattttaattactgttagcaaaatactgatttcctatttacagaaacaatgggtttttcttactaaatttagaaaagcattaaataataggtagtgtatatatttaataaagtcatgaaaattgtatttaaattactaagtttgaggaaattcctttgtttttcaaaagaagaaattgatctggccaagatcacacagtgagtaactggtagagttgggctacatctcaaatggaagagacagaacctgggtactgggtgctctcactctccctatgagttggatgggtttcatattcctcctcttactctgctattcatgcagaaattgaacataatgagctcaagcttctagggttatcctgagcaggtctagggggatgaatgggtcctgacatggcaggagtcccagaaatgcatgtctcttccacatgttacccaccagccttcctgtgtcgatagatgttcgtctttccactgatctgtgtttgagcaaattgatttcctaatcctttcatggttagcagaaattttagatacatcttacatctgtgttattctttcaaaataatttcacccacagtatctgtttgaatcctcatatgaacccagggggttaagaacagaacgtgtgattatccccattttccacatgaagaaagccagtgccccatggtaatacagtgattccatacgggctctggtgcctttctcacagctcactgctgtttcctctttttcctttcagaaagaatgaaagaaaaaaaaaatgcacagtgatctaaatgagctgtaattgctgggcttcagtcccatatttatattttataatgctgatttctttcaaatagatttgtgagccttgtctgtaatgaattctcccaggagataaatgactaacttgtttcaaagagaaaatttgtccatcaaactcgcgggccttgtcttgagattcagtacttctctcctaccgcaactttgtttatgccatgtctgaataaaagatcccacatttccctgagataaaaataagttgaaagaaagctatattggtgacctaagagtttcctattgttccaggaaaggatgaaaggacagatttgtttagctgaaatgtgtgtgtgtatccttaccccaaagtggtattttacatttatgaactctgttggcttcacaggaatcacgtgctgttgccattgtcttttagtatccgggaaaataaatacaggcctatttaggactgcaccttcctgccacccttccctctggcaggtggaatattcccaagagctttagactactgcttatgcgaactttttaatgcatttgtgtcagcagtaatactgctttattaaatgaagctttttcattgtggataggggatgtattaaatgcagcaagccttctaatcacagacagccagcacagccccactctcagtagcaggttaccagccactctccctttattaatgggcttcctttgtcaaaggagggaatgcagcatcttcagaaacccgttaaaaggcacagccttttgttgctgccctcagccataccatgtgaattcagttttcccctgtgtcaggggaaattcatcacaaaaatatatacacgggctctatctagccagcaacactccctcataggctctgtattttcagtctcacactgaagtccactcactgatgggtgtgttagtagctcctctgtgctgctttcatctccctggatgttgagacagctgcggcacatctgaatacaaaatcagtagaaactgtgacaacatggcaagaaaataacctctcttttccagaaacatccaggatccttctagaaatcctttggaactttgttgctaactcatttgttgcaccatctagggaaaaaaaatccctacttctggataaaaatatgtcatcaattcaagtttcctccacttgggggagtgactcacaccagccctagaaagcggtcatccagccttccacttgaacaacttcagtaaagcagaatcccacagatcttgaggaacaccagttcatcattgcggcgatctggaatgtttcatacatgcttttttatgaagcagaaacttcaaaatttcgctgaagccagacgtaggacagattctagcaaagttgtaggtgaatgagaatttcacagcttgaacaacaagaactattaatacatgaagcagcaactgaatgaataacaccattggttcatctcttctgggcacttagtagaagctgctgtgtctagaacactcacttgattcaagaggagttcagttccccattttactggggcttcattttgtaggaaggatgacctcactttaaccgtatctgtgaatatgacccagtgtttcctctttagttaaaatcgacgtatcatgtttaaagactgtcttttcactctggaaagttctgaggatccagatgcaccattacaagggcattttatagtcttcagtgcagcactatcttgcctctttttgcttctaattcttcttacctaccatttctccttcttattaattttgagctacgtggttataattttaaaatatgtaaaatatatgtatataaatacatacatataaatatatagtatataatcatttagagtcatgtatcttaattgttagacccaaagtcactctatattggctgtgttgcactcagcaaatcattttgctggtttttaaagtgagaataataatgagaccaaccctagagcattaccacagggaacaaattttcagatgacacatgtagtaaaaggacttttgaaaatataaagaaccctgtgaatgttaatgattgtctctgctgtgagaaagggcagacagaataaaggacttttcatcatattctgtggcctgggtgtagccaccctgatgaatgcagtgctggagagaggctggaaggtagatctccaaggagagttccaatgaatgtgggattcatcaatccatggatggtgtgttagtgtgcacagtgcagctcagtcctaaaccattcatgtggatgtgattattttctcctcaagcactcgcgctctggtatatattgcaactctgccttcggcattctgtcaggaataagcaataattgaacaaggaggccagatattagtgtccatgaatacagagatgctcatagggaagtctacacccgggcaatcatcagtgcagtcgattatactgccacttgctttctgaattttatttgtattcaaaaggcaagacaagcatcccaagagtgaggaatcctatctgtggtcaaatttaaaattgtcacatacagttgtgaaggttgcacactgcgcaaagtaagggtgcatcacacacaccctggacgttagagagttgtatatttattatgacaaattcctgaagtgtgtggttttaacaatctaacatttcacaatatgtttctaacagatggatgtaaagtaaggtactgtatgggctagctaaaaggataaatttttcttgctttgaagcattttattgttctttatgtcagctctatgtgtgagcttttcctatcttgggcagaatgacagtcaattcttctcagactgaagtgagcaaaacttccttttaaaaatcttccaatcttaagaatctcaggttatttttttgcacttaggaagcttgcagctgttcctaaatcaaagtaaatttgttatctgaaaagtcaacttaatttgtgcaacactttttctgcggatccttgtcctaagggaagtagaagacagcgtcctggaacacacaacagtgcaaagtagaagctttatttatgtcgcacactgtgaggggcatggcaaagtgtggagatgggagtgagattatggtattgcactggagtcgagacatatagtcaagctagggaatgttccactgagccattgatgataaacagaccatctccctgtttccagaggcaacagggaaattgaatatttttcacatgcaattctgcatgtttgagaactgcttcagtggaagtatctttagggagcatttcacaggcatcaaaaccataaccggcagggaaggcagaaggaactcacatgttagacacaaccctggtcggaaggcagttgctgattgaacctggattcctctactggacaaagggacacatattgagtttggcaggactaccaggattggcaggacctttggtggaaaggactctgctcttaccgcctcacttcccagagacatggtacctctcctaaacgttactgacattatgattaagtctacttctacagagaaggaggcccccatttaaaaaggagaagtgctttggataatgtcgagttagtagaattatcagtgtcaaggtcagaactggatagaattcagggtttctgaaaccctgtcccagcctttatgttgttcgttccaggagtgattgactcatggccctaattagatcctctctatttgggcaagaacactgactcttgattttgcggttcaacagtgtctagatactgggtagctgctatgagtagcattatgtaattagacagcccatttggggacatttcccaactcagacatgatccctaacattgaccccatttattccactgttcactgaatgtcagggttttgagaggatgcaagcagagcaccaaggtgaggagacggaactgcacagaataactggggtttttgacatctgcaaggccaaacctcctgcagggccttcaattccacctggttgcttgtccagcccctgatgatgtacagtactgagggaggtcacaggagcccctgagctgcctccagtagtgagctgtcatatatccctcttcacaatgaccttccttcctggcactgcgcctctcccgcagtcctaagtggcctgttctgaagtgtgtggttttaacccttttccagaagtctcagttcactcaccagagtctctgtggatctcacaaggtgttcctgggacataaagcaactcaagaattttctttactacaatgttgtctcaatcaagacatctaatctgttattttcagcctttgtgtggcagaaagattaattaagctatgatgtagaagatataggtttcagcctttgttttctcattcttcaactaagttactaagtaataatggacaaaggatttacttctttccctttacgaatacttcccctgtctaagttacaaagctgatgggagcattaaatgagattgtggctgcgcaaagggtttgaaaattaaaaggtgtgttttataatcttggaccacaatgtggccaataagaataagaataactgccacctcgtgagcccttaactatgttccaggtactgtgttgattagttttcacactttatctcttttaatcgtcacagtaatccaatgagcttggtaccattattactccattattttccgacattattgtgaagacttccaaaagttaaaaattttcctagtatctcaattatgtggcaaatccagtattgaaatcttgactcagccctgagcctgcactctcaaccatcattgctacatcctcagtaatgtagcaattagtaataacaataataagcaacgacctggaagattgatgttcttccattaatctgacagtgaagaaagatggcagagggtcagctaaagtgtatattttgtagaagttgctcatggagccatggcactatttctgaaggacattaatatccaaaaatatctcatttactggtatctacaactctgtctttgcctggagggtctgggatggtttgactgaaatggtaagatcctttctagtcctaattcttggtgcttgcccaaagtagaggctacatctgtttatttgcacaaattgaaggaacctctcttcttatttggttatttcgttgttttgtttttcaacgcgaggctttcaggtaacagctatgacctcactcacataaaccaatggaagaatgcagagacaccaagatgcatggataggccagagactgagaaatcgtcaagttctcagagcagaaaagataagccaagtttgtaaaatagcaaagagcagagccaacccacgtcacatgttaaaataagctccattttatctatttttggtgggaatacaaagggttaagaaagaagtcagctgataattcgtaattgaattaagcatttgaggatgtattctttgagttgtacatttttttttccaccaaagcaatcattgtaaaatatttaggtaacatttgttacctgccaggccgagtgcaagtgctgggaaccacatgtggaaggatagacctagtctctgcccttatggtgctgacagtgtagcgatccacctaagtacctggtggcaccacaatgatagtcagactctgcacggttctaaacatttccagtgcttgcattttgatccttggttgaattgcttgactttaggtaaattgttcaaaacagcatgcaatagttgcttcccggttcatacataaatatggctctcctcagatgacacatatacctattgagttagtagaaaatttagatgtgtatttgctaactttatttttttagtgtgtgctgcaaatgtcagttcaaattttgctggtcaaacaccccttgtaataggctttgataatttagctcctaggaatggcttggttacagaaccccgtaaaagtttattgacttctgcttgctggcttaggttgtaggttagaatgtacctcagaaattagcttcatccagtttaatgacttcattacagagcagtttgcgtgctctcaagcactgcgtaatatattttttaacaccagtttgtagctatcttgagctatttctatgtaataggagaggcgggtttcacttgtttaaatggccaaaataaaaaatgtcgctgaaatgggaccccgtagggtccacgtggttggggactttcactaccaatatggtctgaggtaataattgaatacccaattgaatctcagctaactccagtgttataaagagatcacttgtagtagccattgcttttcctaagggcaaataaatagtgatttgaaaattatatttaggctttacataaaaccaaaggcaatagaggttgatgaatatttgtagccatttattagtctaaatccaacatgaaatgaatttggttttctccctatgcctaaatagagtgttttaggaggactattatcccttctatgttaccctaagacatgttattacacattgctaatgaacctctcagttcactgtacataaatgtggtgacatctgcaaagctgactacttgctagtctgttactgtgttgaagtgtattctgttagtgcaataagaagttaaatttaagaaagattttaaaatatgattaataacaattgtaaatacatgataattttagaaaaactagaataaatatataaaggacattaagtcacacaagatcctaccacctggaaagacctactattaacattttggtgcctgttcatatgtatatgaagatctccagatgtatctggagattctacatctatatagctggagatcatattgctcaatattttcactcattttataataactataaagtaaattttgataatctttccatttgttaatataaattttattggctgcagagtgttctgttctatagattatcctctaaccagtaccctattgctaggaatatggatagtttccaggatttcattattgcaacaatgcttgtgtataaacaaattggtgtatatatatttttgtacaattttaagcttatttcctaatgggaattctttcgaaatgtaactgctgagtagaagtgcttcgctgctgcttctcctttcactcctgactttctctgaggattgcccatgtggctgtgccctgcagggttgcttaggcctgtaatgtggtccttcacacctctctccccttttctccttggatctacacatatgcattccggggtcctatggccttggggctgttttcttgtttgtgagggaggcctttgaaaggtttagacagataagggttagcaatgccttaattaacaacatagaaatatcattgtcatccctgctgtcttgttggctagttcctatattatgcctacaaattatcaacatgtcctcagcttccatctccagaaggttcttaagaactaaaaatcaggaccctttcaaaatttccagattctaataagactgtctattccatcaacaacaatattgacaaaaataataaaaacaacaatattgacaaaaataataaaaacaacaataacaatacctaatacaaattctaacgtgccagaacggaattatgtaatctggccctcggaaatggaatttctttagactaattttagaatattcttttaactgagtgtatgtgatggggcatggggggtagggtgtggagtggggagagtttgtacataattgcttaactgggtttttggtcctaggaggatgtccttactgatttttatttgttttctgtttcacttgatggattggcggcagattgggtatgagaacaattaaaaatctataaatccacagaatattagattttgttaaaactattctgcacacgaggaaactgaggactagagaggtgaagagacaaaattttgtgaagtgaatttatatatttatttatttattagatagagtttcactctgttgcccaggctggagtgccagtggcacagtcttggctcactgaaacctccgcctcctgggttcaagtaattcttctgcctcagcttctcgagtagatgggattacaggcacgtgccaccatgcctggctaattttctgtctttttagtacagatggggtttcaccatgttggcccagctgttgtcgaactcctaacctcaagtgatccacctgcctcggcctcccaaagtgcagggattacaggcgtgagccactgcacccggccatgtgtagcaaatttaaattcagttccttagccactctcgccacataagtgttgtgtttgacagtcacatgttcctaacggctaccatataggacaatacagatatacaacatttttattatcatagaagtttctactagccaactctgctttttaacctctagtctaacacttgaatattggttccactgttccactgaaacattttttacagccactgaatgtcttccagagcaaccctgaatattgtaactttatgtggagaccttttgaaagcaatgcattattgcatttcaaagccatacttaggcttattaaagcatattgtaatgtcactgtatttaaattatccacactggttgcctaattaccactttaagtcttttaatacacacgtcccttaattttgcatttttcttaaacatatcaatttgcacttaaccataaataatagagtgcttagctcatacatatcaatgagaatcccctttagaagtgaaagattgcttgcttaataccaaggagtattttggagaacatcaaatcccttgacagatgcatgttgccacaacgatttattttcttctgcttgtagctaaaatagcatcattttgctatttaacgatattggaggagaaggttatagcaaaatgatttacaaatagtaattgcattttccagcttacttatttccataaacgagcccaaaaatttaatctggacttgtatgtcagactcaacagtatcaatatttgtgtcttcaccaatcacacaagaaggtgtttgcttttgtttcaggtaaaaatgtattagaagttatttcatgcccaatattcatatatttctccatttgattttgactgcattattcattggtgaaagaggtaactgtttacagactgggatttcagtggcttcaatgctcaccaacatcctcctcattgctggttgatgcctagaatcccaggcttagcttagcctaaaatcccttagcttttctccctattaaaatgaaaatatcaaatatctctagggtgggatactattaatattaggagataacatttcaactatgacttgaagaatatgtgtcatacaagtagaaactgagaaagaaaggatcgaggtggtgatactgatacacaaagatagcaatattaatgggggcagcaaatatttcttcttatgtggagctcaaggtttgtaggaacagattgaaaatgaagccaaacagataatcaatgaccagattagagattaggaaggatcctgaaagcatttctaatgctttttgactttagtttatcaatgagaaaggatagggaaggatagggaagaggtgtttttttttttttttgaggtggagtcttgctctgtcacccacactggagtgcagttgtgcaatcttggctcactgcaacctccgcctcctgggttcaagcaattctcctggctcagcctcctgagtagctgggattacaggcgcccaccaccacacccagctaatttttgtatttttggtagagacagggtttcaccatgttggccagactggtctcgaactcctgacctcaggagatctgcctgccttggcctcctaaaatgttggaattacaggcgtgagccactcctcccggccaggaagagttctaggcagaagagcacaacagctttgtatttgtgaaacgttttttgagcaacaatacggagggtaggttagaggagagtggttctcaagcaggggacatgagttgggaggctgttggtaaaactaaggaatttcaaatgtcagaacaaagatggtggcagtggcattgggaatggaaagatgcatagggattctggagacatttggaatttccccagtcttccctccttcacctatttcaatgtaaatgatcagagtatagtcttgagacccttcccaaacctgagaggtgacatagaccaccccttgtctgcttactggccttacattgattgctgcttctgcatcccttattgagccaaaacatttcctatttttctgtgttgacatgtaacttctgtcctctatgtgcctgatctactcagctaatatataagctcctagaagtcacagaccttggttaccttccttttgcatcctctgtggacacagataacaactgagaagagaagagaagtgtctgggatagtgtttcccatatctgacccattcattacctgggaacttggaaaactaaagattcttttgtcccaacatggaacatctgattaagtagttctagaatgagatccaggaatgtacgttctttaacttcagctgattctggtggccatttggatgtgttaaactgtcggcagagtttctgattctgacttttggtcatattggactctgtggtcttatcgaggcactaaaaattgagggcttcaatttccccatttgagaaattacagcattgaagtagttggagtcagaggtcacttctgccatgggatttgcctagatgaggttgctttctaggtcataactaatttcccaccttaagagtagagtctgtcctgggagtagactaggtaattccccaaacgtattagagtgcatccttatgctaatgttctgtgtcactctccctggtgggatcttcttgcctaagggacctccatgtgaggaggctgggtgggcacacagagagagctcatggccaatgccatcgcccacagggaagtgtggtcgagagtcctatgtagagcaccagatggtggtaggtggctaagagagtgtgtgggggctcccttcagacgcctgtgggccagcatcagctgtgcccctgcctcttgccagcttttcgcctacagggccttcttgatgcctgagccacacctcaggtgcgctgaaagcttgctgatttgttatacaatttttctatgccctcttcttccatggagagctagtaggaattttcctatgctaggctgacagcaagctcctccttgtttaaccggtatggataaagagtaattgatgtgcagtattaaaaaagataagtttgatctatttttgccttcttggctgtacttcatcagaagaagttacttgtgaagttgtcagtactgagctggactgcaaagtataccgagggaatgagccgcttatgcagaatgagagatctgtgtgtgcccaggtccttacacatgcacccagcacagagcaggcatcttcctaaaactctctggatgttctgcctccagatgggcccctgtcatcccagattctgcaagtggatcaagtcctaataccttaaggcatccattgtatgtaaggaattaatttcttctgcatctagaatggtgttatttttgtagcatcccttggagaattgagaaaaagtcactttctatgttgtgaggatcaaggaagaaccccagctgaaaaacacctatgtcaggctccccagtctccagagggacaccgcctcaagacatccttccctgagggctatattaggctttcactcacattcatggactgctccttccgatggcttcctctccctctcctcttcattctcacttcccccacatcttcccactagttctcagaggatatacagtgtatgtggtggtgaagggggtggggacacaactttgataaatatgtctatgaacagcattcagagaatagaatagatatagcatggtggaaagtaataagtaagagaaatgaaaatgaaaaagaaagggttgagaaagagagagttgggaataagactggcatttgctgacagcaaaatcttggacccagtacctgatgcactgctcaccaatagcctaattggattttcttctatccatgcattcctgggatcccggactatagtgctgaggcaaacatacttcccctgccatcatggagcttccagtctgggagggaaacagatggaatgaaattgccacctggatgggaaactacaaatgacaatacaagctgggaaggagacgattcgctctaaatgagaacataaaaaaagggttcctgggctggtctggggacctggaaaagtttttccggaggaaagcatatttgaggagacatctgtagaatgaatacatgcaatctaagtgaccggagccaaaggatgagctgacaattgttctcagatgagtggacagaggctgtgttagtggatttttcagtgaggatgagagtctaaggggagtaggaggaagggcaagactgttcctatgtttccttttgtgaccagaaggaatttaccagaggaggctgccttagtcctaaagatgtcttcctttctgcttcccagctactgccctagaggcgtcttaagaaaactaggtagatatggaactgactttatacttggaagtggctgcagtctgctctggtaaacaggaagtaggccaggggctatgcaggggctgtaagcccacagagttcagctcttgcttttctggaaacttctaccagcctgagagttggaatggcagctgctgccctaaaggttgtgctcatgccagacatggctgtgctcatagccctggaccccagatgcaagcacaggctggcactattttaaagcaaaattataacccgagaatagaaagggggtgggtaccggctggacgggtgtagagtgctatcagacctaaagaggtctctgcttccttttgtagtgttttgaaatttgcaaacctgtcctacatctatttttatttcatttgatatccacaggacatctctattttacaggtgacaaaaccatattacagagaagttaaatgattgcccaagttcacagaccatattcttttttagttttccttattggttttcatttaggagtaaccctctaattagagccctcatttttcatttggagacaaatgacaagaaaactgagaccagaaattcttgaaagataaatctcagacaacatttagtctttctcacacataactttactacctcagctcctatataatgaaaatttatatcccccaagaataatctcaagctgccttgtaaatcatcaaagaaagatttaatttagttcagtcctattaggtgtatttatggtgctctgaatcattggtatgggatacatatgacgactctgaggagaccacaacattacaataaaaggaaaaattcattttttccaaggtttttatagaaacaggtgaccactatatagtccaaggccagaaactgataaacacacccagaatcagtcaggatgctggaagtgctgggggctccatactctcctgcaacccttttctgaaaatgataacttttcaaaaacctcttaaaagtagcaaagttcatgcaagtgagaagagatctatgtatttcaatgcagtagtcaaagaaatagctgtctgctcaagaaagcaagcaagttttcatgaccataacataaagtcaaggcttaacaaattgtatcatcccatttgttgtgttacaacttgaatttttatattaaaaggtgatatagtttggctgtgttcccacccaaatctcatcttgaatggtagttcccataatccccacgtgtggtggcaggggtcttgtgggaggtaattgcatcacagaggtggtttcccccttgctattctcgtgatagtaaatgctcacaagattggatggttttataaggggcttccccctttgctcagcaatcattcttctctctcctgatgccttgtgaagaaggacgtgtttgcttcgccttccaccatgatcataagtttcttgaggcctccccagcccttcagaactgtgagtcaattaaacctcttttctttgtaagtctcgggtatatccttatagcaatgtgagaacagactgatgcaaaaggataccttaattttaattcatcggtgctcttgcaatttagatattcctgaagaaagtgttagtattgtcctatatcattcagaaaaaaaaatgctgttatatgtttctatcaatcccaagcccagcagattcaactatgaattttttttcaatatcagaaacatgtttacatataagaactatacaatctgaatgctattaagtggtccttctgcttaaaacagaaaattctgagtactattttccatcagataatatggcaaatatgagtagtcttcccactcattttcttagtactaatatattacaattaaaacattttaaaactaaataactgtgttatttatgaattattttttatattgagttgaaatagaaacacctctagcgttttcttaaagtgttatgagcgccatttgagaaaagctgccagcaacctaagcagctctggccaacctagcaggagtctcacctaataaaccaggggctgtaaacaagaggctataatcagcgccataaaccaggagttgtaaaactgactgtaagcaggccaaatccaggtgtgtttatttggctaatataatttgtatttacatatgaaggtgaattcgttccgatgagaaagatgttgtcccttagccacaggctcccccattccataatgatacactttaccctatgcactcatttatgcttcctgcttagcccctgtgggtacctgagtttgtgattcctccgttttctttgctcagcccaaactgtactaaatcctctatttttttagggatttttttcccaatttctttccaatattttgtaacttaaaaacagcctatgaagatggaaaagacaagccttagaggtttcttgatgtactaaaaggctttctttgccactgatggggtgcagagcttaaccattgctcttactcagcagggaactcattgtcttaagtgtgatagattatggacctacagcattcaaaataactggttcaaacccaaaccacagtcttaatttaaggaagaaaaatttttagacacaattcagtgaaagtttacctgatgtcttcatagagccctttatggtttgtgttctcactatatgatagtctcttcaaatcactgtttctgagtctgacaaaaattggcataccagaggtagtactataattttttgagtgatatcattttcaactcagtaataccagtcataggcagttcaacacctatcaggtaaacatgtctgagacttcagaagaagatttttaaagaaaatataatttataataaattgaacaaagtttggagaggttatttacaataacaattcattctgcttattaaaatatttaataattaaatgctagccaccctggtatattcagatgattgtttatgggactggcaatttgagagtaagtgtgaatgggtaagtggatggcaaagaaacacaattggcagctactgccaagaaaagttatctttgatcatataaggtccccacccccaagaagacacaagatcagtttgacctgcaatttctcaatcccaatcctgtaatgtgagatgcccctctagcagatgtggactattttgctgttagtgaaatgacagaaagtttcaatgtggtgccaagacacaaatctaggaaaaataagtttatatctaatagcaataaagagagtctgtctttatcccccccttgggtcatataagactgagaaatatatttgtaacatatgtagtggtggtgatagtgatattaggttggggtatgtatgtgtatgtttacactgagagtgtgcaatgtgcccagttggctagctccattaacataatatggtgggtaagaagaaggatcttccagtcttccagtcacaaattataccacattgaccaagcttctttatcctcagtcttttttttttttttttctgagatggagtctcgctctttagctcaggctggagtgcagtggcgcgatctcggctcactgcaagctccacctcccgtgttcacgccattctcctgcctcagcctcccgagtagctgggactacaggcgcaagccaccacgccaggctaatttttttatatttttagtagagacggggtttcaccgtgttagccaggatggtctcgatctcctgacctcgtgatctacctgcctcggcctcccaaagtgctgggattacaggtgtgagccaccgtgcccagcctatcctcagtcttactgtactttttcatgacagtggatataagaaatacttcagagggctgcctctagtgataaataacacaggcatatatggtaaacactaaaaatatatctgggagaaaattccatataaggatcatattaaaacaagacaatttaaagccttagaggatttcatctggccattgtttcatatcagactgatccataagagagtcttttagtgagtgctttctgccttgtaggtggaaggccaccccggttaggttggattccactggaatatgaatcacagtggaccataggaggaaacactttttgaaacagagcttcttaaatcctatcagcaagtagtatgtggctgtataattacttatgattactgcaatacatcattttagaaagtacttttcaactgcttcttttccccttataaatgtattattcatatctacataaataacagttcactaaattcgtttaaagaaatccattgattctagtaaattattagacacttgtaactgtcactcaggcaataatctagaaatgccccactcaggatttctggaaactcactccggggatgaaggaggaacaaaaataccgttccatctgttagccaaaccgactataccaaataatttggaacttaattacagagttggctacattttcaaaatgtgatttccaaaggctgaaagttttatttaaatctttctatgtttatttcctctaaggaccatcagtggtgtttgcacatttcacttttagaaccattggctctaaagaaccttcagattagcagtcagacccagggaaaagagggaaacagggaaaactacattctctctcttctcccctacttttttatgccccttcttcatctctagcatagctgagaacaactccatatattttcacctacaaatagagctgtcagaaaaaatacaggacacctagttaaattttaatttcagatagttgtttattatattttagtataagtatgtcccatgcaatatttgagacctacttatgctaaaaataatttatcttttatctgaaactggtcattctgtatttgtgtttattaaatctagcaacccaagctgcgagacaactattttgccaagatatttgcttgaaaaagtagggtcaaagtttatctttctgaaggcataattttgattagaaaatctgaaagaccaaactcttctttgatcccccaaatgaatctctgttggtagaactttgggcgtgcgtgaaaggtggtttataaagattattctgttgggaaagcctttctgttgtacctaaatttagaacatataggtggcatttgttccctgtactcacacgcctggcagaaggagagaaggaaggaggaaagcagtaggatcaaaatgcagtcactgttttattttattttattatttttaaaatttttaaccataaatcttgcactgggtggagaggggagaagaaggttgaaacctgacaacttcacccttttggttactcaagccaaaaatcatggaatcgatttttcttacattccaaatccaatccaacaataagtgttgtcagctttaccttcaaaatataagctgaatctgtccatttcctaccacatcctttgctaacaagctggtccaggacaccatcatttctcacctgaaatatcgtagtagcctcagtctctctccattttcaccattgccctttcagtttactccccacacagcattttgattggatcatgtttaaatctaaatctgagatgtcacttaaagcccttaaatgactgccatttcactcatgtcaagccctaacaatgacctgtaaggccagctccactcctctccattctgcttctctgagtttatctcctgcagtgcctccccatcacccttctcctgccacactggcccccttgcaaatctctcactgtatcacagacacactcctgcctcaggagctttgcaatagtctcctctgcttgcaataggtatctgtttgctttgcttctttggttccttcaaagttccgttcagatgtctcaacctcagcaattgcagtcctcctctactccctctttcttatgctaccttttttctgcctggcctgtgtctttgtaaacactctacctttcccctgtttatcttgttattgcatttctctcccactagaatgaaagctctgtggagatgcgagatgtgttgtggctcttgcttattctggttattactgtatcccagtgcttagtgcctggcacatggaaagtgctccataaatatttgtcgaatgaatacatcagcaacagtttttaaacaaattgcttttggagttagacacttatttggaaatagcagtcttaaaagaatggacataggacagggtagctgtaatgtcagggtcacattttgcagaatattcagagtgtggtagcaggagatgaaaaaggccgagacaatagggaacagttggataggcaggtcattatgaggcctttggttgtctgaagacgtattggggatgctttataattcagccagagactgtccttttgcaaaatcagactctagaagtatttgtttatcatctcgctatgaaagtaatactccgtatagcaatagtcttcgtgctggagctcccacgttattcccaggatctgggaagacattaagataattaaaagcccagttcgctctgggctgtggggatcatatacacagtgtattatgacaactgatctttctgccactcttctctgcttctattcttctcttctgctctatgctgtagtctcaattcgaagacccttataacattgcttccagaaatatcttcctaaagaactaatcaagccgtattattgtctagcttctcaattagcatttttccctactgggaataaactccacctccccctgttttcccatgcttgttttccttctgtcctttctacaggctagctacactgagcttctgcacattttcatattgttcttgttttttcccactctctagaatcacctccattgcctggagaagttctcagctctcacaactcaacttacatgtcagctctttggagaattttcttcatttctcttgaaggcatttactggtccctcttctaggatttcgtaatgccttgcacatacctttgttgcgactgaccttatcataccataatgatttgttgacttatctgtcaccctcagaagatagagcatttgtgtatctccaccatcaattatagcatatagaaggtatgtaataattagatgattattaagtcacattagataatttagtttgtaaagttcagagaaatttattattgctcctttacatatagttctctggagatattggttttgtttttctttgttcttcataataacctcccttaagtcaaacccccgtgacctcttggtcacatgaagatgtgttagttgaaccctgttccaaaactagagagaacaaaatgtctaacagtagctcttttgttgatcataccaaaaggcaaggcaatcatcaacctgcttactctcaggatctcccacattggtcaaaccatgtcattacatgttgtcaggctttgagaaaaagcattcttcattttaattctttgcatgattaaagtcattcaattaccatttgatttaattaaatggcttttatgatttaattttagtgagaggaaaaatgatcagtcattaaaatgatgattgaatgatgatttttttattattgcagtagataacaggaaagagcctttgagataagttttgtaataaagaatccttctggtagtcactaaaatgtgttatcagtaatgaaaaaggagttgttgatattgttaattaataagtgatgaattagtgtggaacctgacacttcatttaccccagtaacattatctcaggaaattacagagaatattattctgtcactcttaagaatttttcagagagagagagaaagagagagagagagagaataaatgtgtgtaaacttccaaacggaaaaataatctaaattgtagtttagcactcaagcaaaactaattgcttaaagaaaatgcatggtgtatattatggcatgttgtaaaaatatcagaatttacttaatgacatattattttctctcttttttaaaattaataactgatactttaagttatatgtcataatattttccttgttgtgaatttcattaggagatttttttttattcccatcaatgacatcctttgggatgctaaatatcaactttataatggagggaaataatttaggcaattaatgttgggaatttaaagaaagctactctaagtgcatatatatttaatataacttgttggaattatttttctgatacaggaagagatagtcggatattcaataagtgattgattatttggttttaggttctgacatcagtcattccatatgaactggatattccacaattcagaactattgagtagttctgaaactaactacctgaagttagcacacaccccacagataaaagcaaagtccttcacaagagtgtccccacttcagatgccagacataagttttgggtgtttgtcctcaagccacttggatttctgcccggctggatacaaattccaagctgcttcatctctacctcaatagtatggactgtaacccagttctgacactacctagagtgtctttgtccatttgcgttgctataaaggaaatacctgaggctggggaatatataaagaaaagaggtttatttggcttatgattctgcagactctataagaagcatggtgccagcacctgcttctgatgaaggcttcaatgtactttcactaatagcagaagatgaaggagagaaggcatcacatggcaaggggaaggaaatgagagaaagagaggaggagaaggaggaggaggaggaggaagaagaagaagaggaggaggaggagggatgtgccagactctttttaacaaccagatctcacaggaactaagaatgagaactcactcaattccatgagaatggcaccaacccattcataagggatccacccccatgacccaaacacccccagttaggcccagactccaaaattggggatcaaatttcaacatgagatttagagaggacaaatatccaaaccacatcacaaagttagcccagaccccacaggttgaagacaaagtcctttacaagactattgctactttagacacctctctagaggggacagttgtaggtctcagggccacccaagcttctgacaaactgaagaaaaatttggaggttctgacaacttccttggttcaaaaatttactagaataattcacagaattcacagaaaaagctaaatttaagattatagattccttataaaaggtatacctcaggaacaaccaaatggggaaactgtgtaggacaaggtcagggaggggtgggggtgaaaagcttttctgtattctcactgtggaatctggccacatcattctttcagcagatcaatgtgtttgtcagtcaggaagctccacagatccttgagttcagagtttttactgaggtctcattacataggcaggattgattaagtcctaatctctagtcccttttcccttcctgaaggttgggctggcccaaagttttaatcctctgattgcatgattgctctttctatgactggccaccatcttgaagctacctatgaatcccaccatgaattgagaggtagagagaatgaacattgtcagtacaagttcagggaaaaagagctcagtggggaaggagagactcagggaaggatttctgaaaaaaaaaaaaaaaaaaaatggacttcaaccaaaccttgaagcatgtgtagaaactggatcctaaaaggagaaaatagggaccttctggtgagaggaacaaaatgagaaaatgtgagacaggaataagtttatggtatttgtggatggtttatatttccttacttgaatatttggttatagggaattctttttcccttgagtagacctgttctattcttcatcactccttctgctagaaggttcttctttgtcatcaaccacgtcaaccttctggtaatttctcctcagagccctgttctgcccttcatgaaacagttactagaagagtgagagtttatttcatggcctctgagtgtctactttccccgggttaagccaacctaattcttgcccccatccttcagtccatgtggttttgagttccccattcattgattttgtctttctggattgggtagtggttaacagtgtgttttgtgacatcagagagattgtggcttgacacctgccgttgtccaggtgtatacattaattaaccactttgaaactcagtttcctcttctatgaagtagggatattaataattccctcatagagtatggtaaaaattctgtgaagtaatgtaggcaaagcacttaagacagcgccccaaatatagtaaatatttgatgtatatgatgtattattaagggaccgtgtctgttagatttagctataaaaaataataacaaaaagctcccagattttaatatcttaaaattaaaataactcatgattctatgtgctggcaacttgagctaggctcagctggagagttctgctgatcttgggtgggctctttcatgtatttgccacctactggtggttgaagttctcacccatggtctggtggttgattggctgcatctgtgattccagacaagtgttcttatcatcatccagtcagcctgggctagttcacatggtaggggggcaggattcccaggagcagccagaaggcatatcctgctgcacaagtgttttccaagtatccatttgtgtcatatttactaccatcctattggtgaaagaaagtctagagttgctgtggggcagcaactcctaaggtcatggattaaaggagagagaaagaatggcgtggctcatctggcagtctgcctcggactaaaattctctttctaaaatagtattttaaaggtgctagttttcatgactagcctgagtagtatagtgagaccccatctctactaaaaattaaaaaaatatatatatatcagttgggcacacctggggttctagctacttggaaagctgaggcaggaggatcacttgaacccagggggttaaggctgcagtgagccattgtaccactgcactctagcctgggtgacaaagtgagactctgtctcttacaaaaaaattgccagtggagaatggattattctattggagactgaatttggttttgttccctggtacattaatgacttttacgtgtgtgtgtgtgtgtgtgtgtgtgtgtgtgtgtgtgaaacagagagagagagagagaagtgaagaaatgaagaagacagaataatgaagggaaactaggagggacagcctggagaaacattcctgaggcaagagaccttgatagcctcatgccatctgggcaagagaactggaggaggtcctgcagctctggccagcccacctttccagcactccaggctctggtgatataatagagagaagggccactagactagttctagagagttatatttctttcatttgttcctttatggtgcaaagacacgttgagtgtcttctccaggattggtactggcctggacacagcgtctagtgctgccactatgattttccaagtgatcatagaaaaaccgtttttcttttacatctgtttaatgagggcattagttttgatgatttcaaaggcatcttccagttgtgatattgtacaattatacaatattatactatttatttttttcgcttttaaagcttactcattttctgtcctggctcttcagctctcagcttattgctttgatggcacccaccaatgggcagaatgaaatactgaccacaaaaaagattgtatcaatagagtcaatttctgtggcagaggacttttcatgatccctgcatggtattacatagaaagccttgaaatgttccttgcccaagtgagaggcagtggtcaatgcatggagatttctatgtcatggcctgggctcctgggagatttccctgataaaaataggtgattgtctcaccctgaggtgggaatcaggcttttttaaaaaaatttatatctcttctaaaatgacaatattggttaaatttggaataggaagaacagcattagctatgggatgttgtgcatttcctcaccctccgtgagtctcagttttctctccagttcagcaacactcacctaacagtgctgttgtaagaaggaaatgacataaagctcaatacatgctaaggtcagggcctccgtccttgtatgacttcaagtaatatttgttttccttttgtccctttacccctttgctgagctgaccaaataggatcttgtgtgctggttgcagcactttgtaaagtacaaaacaaaaaaatgaattattattattggcaccagcacatactccaggatttgagcaatgagaatcttctggtatttctcaaatcctggagtatgtgctggtgctgatagtaataattcattatttcttttgccaactgctgccttctgctgactgttgacccacttccctggggacgtcaacccataagttggtctatacatatcaacttaaattctggagccttagataggtaatacagcaaaaacataggcacctacccttgatttgagccctttagagaatggtacatttcaatcaaatatttcaggccagtggcactcagcttatgggtgggatggctaaccttggacctcatacaatcttgcgctgatcttacacaccttttattttttacagcctgatatagatctgcaaaggactctcagataatcatccacccttatccaaggctttgctttgtgcagtttctgttacccacagtcaagggtggtccaaaaatgttccatggacaattccagaaataaacaacgcataagttttaaattgtatgctattctgaggaacatgatgaaatcttgcactgtcctgctcagtcctgtctgagacataaattacccttttgcccagcatatccacattgtatatgctccctgcctgttattgtataagaaaaaaaaccatgatgcatatagggtttgacactatctattgtttcgggcatctactgggggtcttagaatatactcctgccaataagggagagagtatttctgaaaggcattcagtgaacacaaaatattatttcctttggtgagttgattttccccctcggtttatttttgaaatgctgcagggaaacgccatcatttctctctgccttctcaagagagccataaaatgctattggctattagctaaaatgctgcctcttggtttcattgatctgaagggatttgagatccccagggtgaccagagattaactacacacaaattatattcagaaatgtccctggatacttgctcaggatctgtgttgttagggtggtgcattgtcaaggctcaggccagggttatgaggtcattggaaatttaaagactaggtctgtgcagcctgtggcgtgcagaagtgactcacttctggaggtgaagtccttagagctcataaaaaggtcagcttctgagggtttaatctgggatgcacaagttagctttaaagggggagaacttgagaataagggatttaatcactgaaacaggccattaaatgcttttaagaagttattttctaaagagcgtacattagtgtctgtgggtatagtcaaagggcaatttctccttatgtcctccaaaccttcatacaaaagcacctcctttcactgtgcatctgtctttattccctctctatttagggcccttggttcttacttttttttcccttcattatcttcagctggactgactgagaacttgcatatgtggtgttaaattcatgcaacttcagaagatatattgaaacaaatcaacactatgaattttgcagttgtatagttaattatagtttaaaaattactattaatgaaattacttaaatataatactaataagtgaatacaaaattattattgataaaggctatatagtttttaaaatattctctagtatatatggttagtgtaatataatgcattaaattctcttatcttttcaacatttgaatggaataaaaagaagtaatgctaaagttggaagataataggtttttggaaagttttttttttttaattttcaccttggaataatagaacctgcatgttgatccggcattgtagtaggaaaagcatgtaagtgcagccttcataatgatgctagcaactgtttcttatgaagtgatccagtggatcttgctgtctctttccttctgggagtcttctatcagctagtgataggtcacagggaaatgccaatgggttctgccacagtagagtcttaagaaaggcagcttagacaaatcccaaaacctatgaaccacatctacatgagttatattttcattcacttcaaaccatttccctgttatttaaatgttatttatttgctgttttttttttaagtttaaaacttacttttcttgggcaaatcagatttgtagaatgagaaaagcgagtacatttttctttagacatgattttttgatggcccttggcaaaaaatatgacaatgtaggcctctcaagtgaaatgtctcattacttagttttggtaacatagtacaactcacatttacttctcatggtgtgaaatttcaaatttaaacagaagtagatagaataatacaatcagctctcctataggtattatccagctgcaacaatatcaaccatgggcaatcttactacatctaaaccactgctccctctctcctattattttaaagcaaatctcagatatataatctcatagtaaatatgtatgtgtttaatcagtaatagaaatgtacttttaaaatatgtatgtgtttaatcagtaatagaaatgtacttttaaaatgtagtcatgtggcacaattgttaatcaaaacaacacctgttgcttactagttatgtcttgcaatcttagagctgagcaagcttctctagatgagtagaccagtatccattttaaaacctgatttaaagggcactccagatggttcaagtttttttttcagaaagaagtaataggtaaataatggatattaaaaggagaagatattggtcaaaatcaggcaaaatatgggctagtggatcctcaaggtaataagcaaaggaatgacaagttgcaatttttctttaaaagggaagcaatcttataagaattaaattaaagaaggcagaattttggagattgagggtgacatttaaaaagtcatgtaaatcaataaaatttaggatataggtaattctttaggacaaataactagttttaatcatcaaataaattgcaagaggggagaaaaagagatgagttgtgattgaaagacacttaaaagacattatcaaccaatgagagtatgaaccctgtttggattttgactcaaacaaactaaaggtcagggtgcagggaggggagagaatatcagagatgtttgaacactacctggatatttgataatattaaggaaatgctggtttgaggtgatggatatgctaattacactgattcgatcattacaaattgtatatatgtattgaaatacctttctgtacaattactaaatgtcaatttaaaatataaatttaaaaaataatcaaaggacaaataacaagatagtattggtgtgtgagacctacataaaaaggcagtaacctcatatttaaaaatgcagcctctgagatagaacctgaatgtgtttaagttttcagtgagtattgcttgataggctagggacttacccatttttctggcattatttcaatgggaagatgtctcatgagttacaatagatgataacaggttggatatgcctctggttcaccctaatgcagctgagagaagctggaaagagtgcccctgtgctctcttagagctggaaggacagctagtcatgcaggaagaagggcagttctccagccactgcatatgctgaacatacagggagtggaagaatggaagatgggagggcaaaagaagggtaaggaaaggaagagataagaaagaaaggggataggaggagagggagaaggaggagggaaagaaaagggggctgaccactaataattattgaatggttaattctaggcatcatgccaagtatttgacttgtattatctcaattcccttgaccatgaacaattagtgtgagtagaatgatcccattcatggcaatccaagtggaagagattctgccttctttcttcagcagcagtggcagcaagaagcattatacatttagcgggactacacaagttctcactggattattttaatgtcttaatacagatttcatgttttaaaagatgaggatagtgaattaacaattgaatggaattactagctaattttttggaggataaggggccctaactctggatgataaaataccaccagataacactctactccaaaggcagaagtagtcccaactttctcaggccaatcaattttaaagtagtcagtaaaggagtaagataaacaactgtcaagattttggttgtagttttcagctctgagccctatccagagcagttcttccaacctttccttcccttgactgagcccaaaaaggacagaagtggtggccttttctctctccatcctgatacacagtggttcaaaccagtttcctcttcagtgctcttaatgaagagcattgaatgtggttcaatgcagttttctcttcattactgggtttttcctctactatgaatccaccagttccatccctcccatgatctctgacattcaatcacacatttttttttgcatcatctctgagaattcctcaaattcctaatagaggcagggcaggatttgaacctgttcccagggaaatgtcattttccttttctccttggatattcatttgcctcatcctttgagctttccacacattcctgtctctatcccactccatttagaattttgtcatattggttaagatgattatggttgcatagatagataattcactttccaatggttgaataatagttgtttattactccacatggcaataggtctagaggtggatccccccagctagactgtggagcacagtggagtctctttccattttctgctctgctatctcacttagtcctagtgtttgttcattgcaagaatcaggaaggttgtctgtaggccaaaaaggaggggctctttcttctagacatcactttctttttttttctggaagtgaaatattactctgaggtttccaagtagatgtccgtccagctggtcagccatgacctggcttcatggaaactggcaaaaccagaccatgatgattttagcctttatcatggcagcagactgccatcatggatgaagaaggtggggaatggcaattgagtagattgccagtagcatctaccacactggtatctctcttattgaattttcattctcattcattctctaaggaagagattctgccctctttcttcagcagcagtggcagcaagaagcattatacattcggtgggactacccacattctcactggattattttaatgtcttaataaaagtcagtgtcatactcaaatgtgtccatccctgatgacagtcaactaacactttaagatcaagcctgggtgtcttgacattcttacctcagagtgatttctgttttcttccaggggatccatggagaggtgaatggtcatcttgcttctggtctttgtacaagggtcatagtctggggaccaagtcattattcccaaaatgtccctttattttgtcccagtgagcccactggataaatagataaaactcagagaagccaggactcccagtgggaatgcaaatgaatgtcccttcagagatgttcatcagataatcaaagtctgatgtagaattaaatggtctcctgacagatgagccttcaaatatgaattgatacagaataccagcaacatttcagccactgctattcacatgttgttagacaggcatgacttgtatgataatagtcactgtaacggatataaaattccctatacaacaaaggtaaaaacatttcacttgcctttttattttttcttttcaaaattgcatctaatccacttgatgcttcctcttaccagggaaattgactgtcaatttccataaagattttcttacagtgccaacccatcttgattatgcagtggtccaggtggcctaatattggtccagaactctcaggaatggtgctctgatcttcaggccacctgatttccacttacctgctcattgtctatgtccacatggtcccttgaatgcaggcagaattgctgctttatgccgtgtttggttattgaagtctcttctgtggatagacccactggtggccatgacccagcctcctaaggagccctccgtacccattcccctatggagtctgcatgtccagcaacctccttcaagtactttcttcttttccccccgccccaccgtgagatgatattctcctcagagggccttaggaaacactagtctggactctgttctttgtatgatgagtgtaggggaaggatataagagtggtgagttgttttctcactaactcatcctgttatagataggatacattccatattgaaatggaataaaattagattctggattgtcctggtgatgaagtagctacttataaaatatcaaatcatcacatgctgttgagcattttgctggtgcgcttagccagtgtttccctttcatttgctgggctgcctccatgctctttcacatcgtggattgtgctcttaggagacccttttcttccattctgcatgtcaaatcccacccacctaactagacacagtgtatagtccaccttcttcatcaagccctacgaaacttctcacacattccctgaattgaggaaaccgtttccttttgctgtatcattggaagactttgctacacctgtgttatagtattcatcctattctacctttggttgtcattatgtatgtggatgttgtacccattgtattggtatgtaaaccctttgagaggagggctatgttttcttctttgtgattcatcttcagtccctagaaactaactgaattgaactgatacaaattagttgtcccctgaccataaatagtatataacaggacacaaaatatatagacatggtacataagtaaattaatgatatgaacaatgaaaagagatgtcctgaacagtccagagttgattgctaaggacaatgactgttctaacaccttctgatggtaagagggaggaccatggtgagctgagggcgtcaagaaaagcctcatagctgtctttacaacttgagatggatattgtgtcatcatgaaaattttactgagtagaaagaaaaggagaggacagggaaggcatggaaatagagagaatgatagaaatgacttaagcatcttttggttattttgggtacatcagaaagactaccatcttcccccctcccgtgataccttatgttttcatcaaactttaaaacttagaaactgctgtcacatatactactttatatgattcatctagtgaggtccatagactgaatttcattccattgcaaataacattgtaaaggagattcactgtgtatagtcaaaatggactccattggtaatagatatgcttggtaccaaaagtaatgatgacgaggatgacactgatggtgacgatactgacgatagtaataacacttactgaatactcactatgtgcccagcatgtgcaaaatgttttgcatatattaatactaaacctcccaacaccttgaaagtcgaatttttaagccatctctagattaataggggttgagtcgtttgctctgcatcacacagctgttgttcggtagaactggggctcatattgaagtctattttattccaaagtccagtcatttttcattccctagagccctaacggctgacaaacatgacaaagggaagagcacaagtgtcatctcatgatatgtgcttaactcacaccttcgatagggtacaaatgtaatctgcattaacctgctcaaagttcagcaccaggtaaaggcattgcatttacttagtgcttcatcttatttgcgaatacagatatgtgggcttaggcaattacctccttagttaatgacttaattgcctcttcaaggtttgatcttgatactcaaatcatctccccgctaccaaccctatttttgttgacacctcaaaacccatttttgggcctttgtccttagttgctgcccagggtcctctggtgatagcattccaagtgggggacattcaactgaaagtgaggcaaacagttgaaaccccacggcctccttaacacagggattgaaaacctccaagcgatcaccagaaatttatgtttgctgttagaaaattgctttgggaaatgacgtggatcaaagaagtaaattttatgtcaagattaactttagtagtgagcaaagcagaatttggggggagaaaaaaaaatatccctaggtgtttcattacacttgtattaacattctttaatatttaccacactcatactttttgagccaaactgtcagtgaaggcattgaactacagagaagattcaggaatttctctggagaggataacttcagtctcattttacaaacagaagctgtttattacagatgtgcttcaaacagctggcagttgttgaaagaattaaggtgaaaaataaaattcctaaaaaccccaccacacataaaccaggaatccactgcctctggactggcccagattcttcagcctgtttccagaaattgctgttatgcagtctgcacagacggtggagtgcttggactaggaagggaggggaggaagcttggcagggcaccagcttggagctcgatttttcttcttttttattccccccacaaagagctgggcctggtagaaaataaaacaaaaacagatccttttcctctctcacatctgctttcatcccagttctttggggttggtggccccggataaaccagtggagctcagcaggctgctcgctgctgaatgtgttgctggattttgctgcagttcagtgctgcttggctgtgaggtccaagaacactgtttctcatgggccgacagatatgggaccacagtagtagcctttgtgtgagggttcagaaaaacaacgcgtgcacttttaagatgggagtaatatgatgcgataaatggttaattaagccgagatggatttctttcccaccttcttccagaagtctccatttcagctcttagaagatctagcagatatatgctgcggatgagaggtctgctcagagaaggaggactggggactgaatctgttgacagaactgggaagaaccataatattaaaataaataaataaataaaaggcagtcacctgaggcaagtgtcaaagcatctgtagtggctaagggatctttgtaacttccctcttaacattccagttgccattgactaacagagagggtgctattcttcatcctgtttactaattattctgcaatattacttgccctactaatctctaccccagttctcgcctctttagagataatttttatattactgatttagtgttctcattaaagaaacctcttaaatcctcttcttagcttctgcttctaggagccaattgctcctaatgccatccacatttcccctgaggctatttttataaacataacatgtcactctactgtggtgatggggcaggagtgggactaatgctgattgagaatctactattggccagcaatttggccaactcaatgcacatgctctctgataatcttcctaaaaaccagcaaggcagccactgatatgaccattttacaggtgtggacacccaggttcacagagtcacactagtgactgtctaaggccacttagcccacttgggtcagactgtgttatacggtagggaaaaaagtcaactgacaggagggacttcttcctaataagaagtcaaaagtgtacttgcctccctgctccctgctacggatgatggagtaatgaaggacttaattcacagcagtgaccaagagcaggaatttaaatccctgtggaggagagtttgaaggatatgggcctcaaaagtcactgtgtgtgaggggccaaccacagagcttgggttctcatcactctcctcccactgccttaaatctttgcataggacctcacagtttttgaagttctgtcactcacatgatctcatttgatccttaccagatccttgtgaagcaggctgagcaaggattgttttctgaattttatagacaagggaattgaggtacagaaaagtgctgatttatctaagccagcaaatggcagaagctctgtctaattaattccatgccagatagttttttagtacatcatgaggcctccaaataaagacaactctgggatgtgttgaatgcagaaggagctgataagacaaagtccttcacatgaacctgtccaaatagtctcagtcctggttttgaatactgaagtacccaaacttccttgaccttctcatttcttccccagtgattaccgtgggtaagaaaaaaaacagcagaaagtaaaagcgtcatgaaacctcaccatggtgaggttggtgaggctcccgtgatgcttttactttttgctgtttttttctcccacatggtaatcattatctagctcagtgtttcccagccattttttttcattctcccactgcccccttgaaaatactatttagacattttttttcctaattactccccctccctgaaatcttaataccacagatatgttgtatatctttttatgtactatatgtatatctgtggtttaccccaaaaattagtacaatttatttcacccacataagaaacaatgtttgctccctcagtgccattttgctcttgttgtgaatgcctggtgtagctcataactatgaattcggtaaaaagaaaagaaggaaggaaggatggagggagggaaagaaaaaatgaagggagagtagaaaacaaacaaacaataaaacaagccagcaatgacgtaaaacactaaactgacgatgtcctcaatttcccaacagctctagcattccctgctagtatagattcaagtattgaggtttcactatggccaaagcattgccaatatttctgtccaaagctgggacagagcatgctttaatcattctgtgagtgaatcccaaagaacaaggtgtggcttgaaacacactcaacttttggaatctcaattccctagttgcaaacgagaatgttccctctgaccaaagatagtttttcctcgtgggatttagtagatctctaaagacgttggagtctttcccttgggggaagttcatcgctttgcctgttgataagcgatagcaaaggagaatgcatagaaagttactcttacttttattttctcctccttaacttcataccctgcctaacaaattggagaactagaaggaaagccagaattcaccactacagacctaagaaagaaaggtctggacaggtggaaccaacttgctcaagggccaggagcaaattagtgtcaaagctgggacatggagtttgtctcttgatacaggacctcctctgccagaagaaagggtcaacctcagatgtgtacttcatcatttgttaaatttccttgagcagcatccaactatggctgtgattacacaaagaaaaagcttctttaaataaacaccagcaaatctgcttcagctgaagatgtatgcttagtgtcccaggggccagtatgatttaatattgccaatattaaataagagtttggggcttggataacaattgcaagctgggtagcagtttttcacctccaggaattgactatagatagcaaacagctcagatgtggaaacagtttttccacatcaccagaaggcccttgtagctggctgctagccttcagctcctatgaaaactggaagatgtgtgtgcacatggccacgtgtattccaggatcaggttcaccagggctgccagaccacagtggtaaaggcaagccactaaagaaccagaacaaagtcagtgagtggtgtatgggctaaggcctggccagttagaaagctgggaaggaagccatgtgtagtctttgcaactccagacttcactgcctccatatccctcttttaggcccagtgctttcaggaattcaggtttttgagtctcatcctatcacagaagaaaatggtgacagcctagctttgcaggatgacaatcctggttacaccctgattcaaccccttcctggctatgtgaccttgttttgttcatcttttatttagaaaacacttatctagtacttgccacatgccagacaccattctaagcactttataaggaataactctttcattctcagtaacaatgggcttaattcttataacaaccctatgtccattttatagatgaaggaactgaggatcagaaaggttaattgccttgccaaagtcactcagccagaatttgaacccaaggaatgtgtctcccttgacacatcctaccatggtaagtgaccttgggcaagttgttgacccaccccaacctcagtttacctgtttgtaaagggaggatgctaatactactctgaacgaggagggatgaaggctttttgcagggcttaaatgagaaaatcttaaggattttgcaggttgccaggcacctagcaagtaaaatatatgattaacactcctataggtggaggtcatgtttcataaatggatcaagaagaagtggaggcctcttctgcatactctcatggtgagtctgataggcctatgccagcatagtcctcttgagaatgcctcaccttcgcaggtgcaatcatttataagttaaatggttctattgttcactccacaaatgttgacttaagctctgaacaagaaatgttgtgctactttgattgaatgagttgagcaatataatcggaagttaaaagcatctgagtgatatgttatgtttagtggcatttcagttataatgtggtttctccttttctttcctacagcatgtttgctcttttttttgtacctttatgatttttgaaataatatgcaaaaaagatcagtatgaaacactcagacaaaaaatggcctggacagcaaagcagtgctgctgcattctgaaaagtcccattatttttaaaataaaaatttaataaaataaaagaaacacagtctcagtttcagggaaatatagatttcaccataaatgcaatcactatggagcagagacagtgaggcaaaataacagagtgagtggttgttctgcagctgagggacaaatgacagaattgccttggccagctgaagacagattgttgcattgttccattaattgtgtgtaacttggcttttccagacctttctgtggcagactaatccagctctgtgtgctgctgagccatctcacttatactgaaggctgcctacaatatctctaagatagagagccctgctacacatagtttgcaatattgagagttcttcactgaggataaatatgctgatggtgaacacctaaaaatatgtgatttttaaagaggactttggtttaaggaggtaaaatatgacagaagatccaatctttatcctggctttactttaagccccataaactgttgactaatctgctcttgtaagagagcattcacttgtgttgtttcatttaaggggaacaaggtgggatgtcctggccaaatgtatgctacccgtctgtttaagtgcctgaaattccagcattagagtgatttcctttggttatttcccccaaagatccttgtttaagttgcaaaaatccccggagtagaattatcaccactccaccgatcagtgtcctactaggatttatgtttacattcttggaagagctggtggcaaatctgcggatgcagtggactgagtggaaagggaatattttggtgttaggggtatttggaaagaattgatgcctatttggttgtctcttgggtgtcgtggagtctcctttggcaaagaaaagagtgtcaggcttgggattggggtggagacacagaggggcagtggtgaaactatgatgtcaaactttgtaactgcaggacttcagtgggaggaggtgtaggagcctgtgtgcaatgggttttccaggaatcctcctaaagaagttattgatttgtatattttgagcaggactagctttacctcataatgacacaaccaatcagagaaggaaaggaaggtggtagcgggagaaggactcagaatttagaagagacatttctcagtgccagcccagcagtaacaatgaccttgggcaagctactgaaccttttcagatttgagtcttcttgccttaaaaatgggacaagtttatgtctgccttgtgaaattattgggagagtaaaaacaaatataagaataattctaaacagcgctttgtaaactagagtgctcagagactaattctaagtacaccgatgcttgcacgtctttcttctatcagtgccaccagatggagtcaatggcaggaggtgggaaggtgactcccttctccctgccatgtagcccacgtaacctgaccccatggagccctgaccccatggagccctgaccccatggagcccaggcaccagccaaccatgtctttttaaagagctgcagtcagacttttggatcttgtagattgctgagttgtccatgctgtgagtaggcaacccgctagctcagtgcttctcagccttagctgaactatggaatcacctgggaagcttaaaaaaaataataataataataaaaataattctcctcaccaaggccacaccccagaccagttaactcacaatctgttgagggtggggtccaggagtcagtatttattgaggctcccaagtggttccagtgtgcagccagggttgacaagcactctgctagctgagcaatagagaaataagatgcagctagagaacgaattccttcttctcataacacgagggaaaataactttacaacattacattgagaacagacaaatagctaacctggtggaccagaataaagaaatgattgaaaaggattgaggagtcagtgtaatcacagctacttatgttaacttgagtagcataaaacacagatcttgaaactctctcctcttcctctctttttcttttttctttctgttttgttttgttctctcttctcctctcatctccttctcccaccttgcctttttttcttctcaatctctctttctctctctttccctcccatcccataccccattttactagaaaggtctctcaattcctaatatccattgtggccacttacaatgtagtatgtcattttgagagtcctgaacaaattttttttttttttgtgggtagggggctacctcacaccacatccctgtgtctcaggtctcatgtgcgggtgagtgtgtgtgtcctctctaggattccctttcatctcttctgcacattctaaaaacccaattctcccacccatacatgcctgagctttctcatcttctcctctgttttccagcatgtccacctacctctctgaagcccctgactctcagtgaatttttttttaacctatatctgctcattaatattcaggcaagcctgatgaatcagaatgtctggaggaataggaattcaggggaattttaattttctggttaagtgacactctcttgaaaaccacttttgtttcaagttttattgtggggaaaaaatggtaaaatagaagccccaaactggaaaggttcttagggaatacctagaagaatccttctaaaagtagacacagagaccaattgcagtaagatgattaacagatgatcccaggcatgtaaatgacagtactatgtctaaagatgataactcctgacttctagaccctatttcttccagagcgcttacttgacctgccctgcagaaatgttatgattaaccagaaccaaatgtgaattatattcttttaagtgaattctctagttccttataatttcatctgcccatgaacctcactcatctgtgttgcctgtctgtccccagatgaatttcagtttgcagttcttgtatctctagactatcctgtttctaaggactgagatcatttccctaaatatgtgcaccctactcaccagactgagcacattgatttttttctagcttatttttttttagttttttacgattattgcgggtacatagtagatgcataaatttatggggtacatgagatattttgatagaggcatgcaatgtgtaacaattgcatcatggaaaatgaggtatctatcacctcaagcatttatttttttagcacactgatttttaaaatagaggttcatcaccacctcacatacattacagttttggttggggaagaagaaggcacaggctggtgggttggatttgttcagactgcagaacccctcctggaaggaatatcaagtttctcattttccttcttgttaattaaatctccactgttaacttgatttttttttcctgtttcctaaatgaggtattgctaaagaaaaagtgggtcaattgagggttctgactagttttgtcctagttaatttaagttttgccatatgttctttgagaagcatgtgttaactatgtgttaacttttgctgattatcagtgaacctaagggcttttaatttagatttccagttacctggcaagagaaagacttaaaaggaataagtctaggtaaatctaaaactaactcagaagtaagaccattccttgtaaagctgaagcacagcatgatgctttagatagcaccattactttctgtcgtggagcagggtttttcaacttcagcactcttgacattttaggtcaaataattatttgatgtgggggatgtcctttgcttgtaggatgtttcacagtatccagacatctacctactggataccagtagcaccatctcacccatgcataaaaattttaactgtctccagacacaaacaagtaaatgtctactgggtggcaaatttgcccctggttgagaaccagtaccatagacacatgatccatttaatcactaaggaagaaatgcagataaatccctgacaataacatatggatgtctctactttactctctctgagtctaaaatcctattttaaggggtcggactgaatgtactggccatttcttctcctggaaccccggagaagtctcctctattggcagagtcctgcattgcccaattaccagtgaccagagcaaacaagtcatggtcagaattcctggatttcaccactgtgcccatggcattcaacaagaatgtgttgagcatgtatcctgttcccagtctagttctaggctctttgttaggtgtaggagtggaggggcaaccattcaaggaataaagaaacagtgtgtagtgaaaaggccaccaagtcaattagcacatcccagtgcttccaatcactagctgggtgactttgcacaatgtacctgacttctgtaagcctcaggttcttcatgtgaagataaggttgctagcacctccctcacttattgtgatctagataaaggcaccataccagcgactgctcagtaaattgtatttctccatctcatttatatctttgtctaaattgtaagaatgcaattgccaggcccttcactttgagtaaaaaaagcaaaagtcttcagaaattgtgtccagttgagcaaggccaggagatggtgcccaatcagaagtaagaattttgcctcctgaatcccagaaaaacaaaaaaatcagagtagagcatactttaatggaaaaatactgaggtggaaaatactctcaaaaaatatattcccatttgctggctcttcccactagacagcaggttacactctgctgtggcataaggagcccagaagttccccagcctgcaaagcgtctacctactcattaactaatgcctgaaaataccatcagccatatcagtcatttatatcttaactgtcactgattttatcagatcctttcctgaataaaagtttgattatgaagaagaaagtattaggatgattagtgctagaaggtagttacataatggtcacctgcctgcgcgtgtatgggtgtgtgtgtgtggttatatatgtgtgtgtgtgtggtactatgtggttttatatattatatattatatatatatatacacacacacacatgtgtgcatatttgtgtgtgtgctgttatatatacagagatagattgagaggtaggagtgtgtgtgtatatttcagaagcacatttaatggtcatattctagctaattccttttttttgacattctaaacctatctcaaaatatatttcagaagcacatttaatggtcatattctagctaattcctttttatttgacattctgtcaatggcagacccaaatcagccaacatcgccactcatctagaggagataatttatgtttattttgactaccctgaaacattatgacactcttgctccaaaacagatataatttctggttctttgataattttctctgtgagaggggtatgtgatgatgttccttctaccatctcatgtgatccatcaatgccctgttctactgggccatgtcagatagactaggcatcaaacttgctgacaagtcgactaaaataagccggaaacacaagtggcccctaatcctaccagagatctgtgtgtacttgcttggaaaacttgggaggaataacaagtggcatttgcccctctgattacttacatatactcataaatgtgttgttgatgctaaatcataccaaatgtctgccttcttgaaggcagagagaaaaggttgggggctcttctactttgatgagttcagaagaatatttttaaatggttgagaaaactatttccttttactggaataacctttcctttgcgatggtaactttgtagtcttgggagtataggctgcattgtgggtaggtggtctcaactattaatatcaaggctaagatctgagcatcagggactgcctattttttctgagtgcagcagaggacaggtctcatttaacctgcttcctctggtccaacctaaaaaactactagggctaagactggtgtgagagtgtcatttgtcatgtgaaaagactttttttctatataaatattcgaaaaacctcaataccactgctgaactttaatcagctgggaaggtactgcaaatggagggtcaatccatcacaatgcccaggacgagacgtgaattgtggccttaagttcttttcagatagcacagcataatgagattagcaccctctgtgggaagaataaaaaaaaggtgctacacctttaaaaattagattctcttttaaatgcttagtagtttgcttagaggggtcagagcaagtttcttgaagcttaaagattaattaatttgagaaagaaaagatttcaagtgttacaaaaccttagttaaaactaccactttcccttattcctgccgtttccccccacctccccccaccaatctccagagctagaggcacaggggcatgaaatgatgtgagctaaattcccgtttgtgtagacaacgtttgcttgcctacaaagacacacaacgcagaaacatacagacacacacacaaagtaagaacatagctttctatggtcatcatttgctcttaagctcccagattgcagattcctctttccaatggttcttcatgaaatgcgtatggacttaagatcttctacatacatgatgtttaatcatgggcagggtgggaggagtagcataaaacaaagcacgattattctctctctgtcttatggccaccttgaaacaagaagagtgaaagataaaaatgtcttggggataggagataaactacagtttccaatattcagatttctagagggtaggaggggacttgtggttctgatgcttgccagaaaggttttgcttctgaaagctttccctgtaagcacacccacacagctctttaatgcaccaagccaaagcagctttgggcgctggattcctgtagccttcctatgagatggttaagttcacggaatccaaggagccctccttcagttgctacattttttgttttctaaaaaaggtatgccgtcttctagaggaggtcgctttagtagggttttaggtaaggcacatccctgagagaatctttttcctgctacccctgctcttggagtggtatgctatttagaaaggcaaacccaaatgattatgcttaaattcaaaaccccctcctcaaagttatcaaacaaagcacctctcttctagaacactaatagtctgaatgggtgtcatgtgcatgatgtgtgtcataatgtcatgttttaattataaataaagcaagatgaagtttcctggccaggaaaaatgagctggggtgttggggtgtgtgtgtgtgtgtgtgtgtgtgtgtgtgtgtgtgtgtgtgtgtgtgtgtaagaagctgtctcccagggcttaacatcttaaaagacatttgcaaaatatttctcttgaaagagactcttagaaatactatttttaggcatactggtttctccataggtaaaagagaaacctaccaccaacccttagcttaaggaaaccttctggtgataccattctgcatttcaaaaagctgattttgcctcctaagattggtagctggagacatttgcatgttgggggatggtagtgtgtggttccccatccccccattccctcttcctgctatttggacttctctctctcaaaaaaaaggaaaaataaaaacagaaagatgcaactctttagtgtccgttagagagggaagagaaagacttagggacatgggctacattggttcagcatctgtcatccatgacagtttatttcaatcatacatttgcttaaattgtcatctgatgaaggagccctccgtccaatgcacacagccttccccttcccttctctgcacccaccaactgccactaccaccacctcctcactctttagttcaatagaaactgaaatctcaatgatggacctggaaacctatgaggggtgagaaggagcaatcatcactctcaacacagaaaaaaaaaaaagggaaagcaagcattacacaaaagggccatctgagaagaggcagcttttctgtcctgggttaacaaattattcccatctcagaaatatgcaaacacaggatcaaatgagtatcttctcccactctccccaccccatcactgctctgtcacctctgcccctaaagtctcttgctacaagtcattaccctgcaggcattcatcctaaggtaggtttttctcctcattccccatagaaactaggaatgtgctgtcactgtttgggagcctaagcttgctgcagtcttagcaatgtgctccagaagcacagctttcagccctaaacatcgggattctgcctccttcccctcagccagaccaaagagagcagtgagctgaggggctccctttaacagggggtacaagaagggcacaaatgctactaagtctggtgaatcaaagactcaggagaattaagaacaggtggcatttggggatgagattttgaggtgatttgaaagatggttacattaagtgcaaaaatgtttcgtgttcctaggagaaactgtctggcattgctttttaaaaaccatttgcaatgctctctgctttaaaggctgagtaagggtgcccagtcctcagtccacctctcagttgcctgaaggtggttagattgcactgtccctgccccagtaatataaagggtcttgcagtttttctttttctagtccttacacatgtggagtaaattaacataaatcattaatctgataagctttctttgcccttctttaaaatttcaaattgaatctgactacgttgctcctggattttccttctggcccctggacaactccctccccacccaccaaggaaattttaactgttgcttttcttgtaacacaggtaacaattcatttaggttacaccagtctgtaaaaactgtaaatgctattttattttaaacattttagtttacaaaaaaaaaaaaaatcaatgattggtaccttttttacactctcagattcctgaatatggacagatcttcaaagggaggaaggagttctcatatgaaatttaagatagactgtcctgaaggttgtggggtggggttttttgttgtgttttaattcgcttttgtttttaagacacaataaagctaaaatgtcaagtctctgggagagatccccttaaagtttcagtcaaggagcatatcagagcacagacaaggagaccccagcctggtgcccgccggcccgtcccggctgcccaggcgtatttggtagcgcatgggttgagagccactgggacaatcacacctcgcattccctcgcgggctgctggtggcaggtacacgagccatactcgttgatgatcaccagggctccctcaatgtggttcggtttgtaatcaacgtagtattcctgggcagacatggcagccatctgatgcatggtctgtttctgcttttgcttcctgcgctgcgtgacaaagcactgtctgagctgcctgaggctggctgggaaacacttccaggacacgtagagcaccaggaccacgatgaggaaggagaagatgagggccatggtgcccgtgaccaccttgtggatctgcacggcgttctcggcgtgctcgccgcctggaagagccacggtggcaggctcgaatgtgccgtcgtgctgcccctccccgccgtccgcgagcgtggtggccgagctggcagggggccccagatcactgcggttggtgacggccgagagcaggtggccgctggtgggctcggccccatcctcgcacaggtggaaggcgtacacggcgtccaggacgtcctcgccctgtgcgtactccgggctggcgcactgcaagttgccatcgtagcgcccctggaagttgttgagccacgaggctagggcacacacgttgcgcccgcaatcccacaggttcccggccagggtgatgcttgtcagggacttccaagagttgaggatccggggctcgatgtaggtgaggcggttggagtccagctgcagggactgcaggtgcggcacggtctcgaacacatggggctccatgtactcgatctcgttgcccgacaagtccattttctccaggttccaaacccagtccagcgagctgaccacaatggccaccttgttcctccgcaggcagagcgagtgcagggagatgaggcgcgggaagtgggcgaagttcaccttgaccaagtcgttgtgctcgaggtgcagctcggtgagcttaaacaagccggcgaaagagttgcgcgccagactcttgagctgattgtatccgatgtcgagaaacttgaggctgcggcagtcctggaagatgcgcacgggcacaaactggatggcgttggcccgcatatgcagcgtggtgagcttccgcagcccgtggaagaggtcgggcgcgagcgcctgcagcttgttgtacgagaggtccacgctgcgcaggttgggcatgggccggaaggtggtgttgggcagttgggtgatctggttggaactcagcgtgagttccttaactcggcgcagtttctgaaaggcgtccccctgcacggagcagatgtgattgtgatccagatagagccacgtgagctgcattaaccccgtgaactggccggcgcgcagctccgagaggctgttgtagcgcagggacaagcccagcaggccggacaggttgtggggcgcctcggtgaggttgagcgcctcgcagtacagcagccgcccctcgcaccggcacagctgcgggcacccgctgggggcggcgggcagcatctgaaagcaggcccccagcagacacaagaccacccccgagggcctcctcagcagccagtatagacagagaccgagcagcaggaaatccattagcgagaatctttccagagagactggagaatgtccattggaagcgctcggtcagaaatctacatcatattttattccgagggaggggaagcgggggagggggagaaaagggcaaaaaatcaaataaatacatagaaataaagaaggacccccctccccaaaaaccacacgttcacctctaagcatgcagaaagctgggcagcatagaaagttcacagccacggaaagatcaaagagatggtgatttggtccatgttagatgctgcagcaaagaaaagggaggaaaaaaaaaatcttcgggaaagaatttaattaaaaagtgtcttacccacccttttccagagagtgacaacctccattcagctgctccctttgtgtgcaggctaattatatgcagggcgagagaagacccctctgtgtttccgaggcagccccggtccgcggccggcggatctggcaggcgcacaatgtctcactttgctgctcggctcggggctgcaagggcggccggcaaggcggggaggcgacttctaggacccgcaagtttcccaactacgtgccggagcccgagcttcgccttcctgccgccttcctttccctctgcagttcggactgtgacgttgtggggggaaaaaactccaaactcggggctcgcgactccccaggatctgacagtctggttaatgtccgtcattggaaacgaccactgaccggcgccaccttttactccgcggaaacagcctgccattcgcgccccgggcagctgcagagagcgggctcactcatgctttgcgggcggcgggcggcgggcggcgggcggtggggaggtgcggacggcggcgcggggagcggcgagcggcgcccgggctccttccctccaccaggcagtgtgcggcgcgagcttgcacaggcacctactgctcactgagtgtcgtaagctgctcacgattgtgcgtcttccccgagcacctcagacatgggcagattgaaaaggggtgggcataaaaccaacattttaccgaaccactaaagtaatatatgttttttgatgaaacggaaaacactttcagcttttttgtccatatttcaaaaaaaaaaaaaaaaaaaaaaaggaggggggagggaggtggaggtaggggtagcatcatccacgacaagatatttccaagtgggaaactgaaatgttctgtgctctcccccttgccttttggggatatattcttttcccctttaaaactgtctacgtgtaagagatacgtaggaatctgtagagaaatcaacgtttggacctttgctttagaaaagcaacttgagagaagacacaggaaggcaatgatttggggcttggctaagatttttggggttttttccccctcttgcgggtactggaattctgcagtcagccagcccttttttgaggtggagaggggaaatgctttccaaacccacctagtttgggaagccatccaagtcccggtggtgtgagatccagtgtggcaaaaaggtatgtctgtgtgcagggagacttgactgagatccctccggggcttcatcaggctccacagatacatatggggtacagagtggattaaagaacgattgtactgtctgacatggggagggcttaccctgacttgtgctgttcatggtgattactgggccctgcagtgcaccccactccaagagagtgtgaatgtgtagggacgtgatagtttaagccataatgaagcctacccgtctccatacacacatcctaattaatctttgagactgcactaagttgtgccactttttcctctgagtatgacgagaagcctttgcctcattatttctattcataatcatttatagataggagtccttacaatgagctctccccccacctccccacacacacaccttgtgcctactggtctgtagagggtctgccctggggagggtcagttggtcatctgtttaaacaaagtcctccaagatggctgagaaagcctgcgggaagtgagtgtgggcaagccttccttcttgacaaagatgcccagggagatggtagggagagtcaaatgtgagtctccagctccactgtttgaattcccatcgtttctgcctctaaggaagtcaaaatcagtaggcattatatgtagtggcacttactttgataggaatgagggtggattaccagagccagggtagatagactggacaagtaactggattggtccttagcatctaagctgaagaggccaaccaatggaatcaaagtcaccaaagactggtggtacttttcaggaaaagtcatatgaacaggggcatgaatcattccattttgtattcatctgagctctgccctggtcattcatctctgagatgtatcatttaattggaaggaacacaaatctgaaatgtcctagacatcacatgctgtcttaggagttagaagagacattagaaaatcaacccccttaattttgcacgtgactaaactgaggccaagagacatcatggtttatccaaggtcatacagcttgcaactggcacagatggttttttctttctttctttcttttcttttcttttcttttcttttctttctttctttctttctttctttctttctttctttctttctttctttctctctctctctttctttctttcttaatttgccattcttgatgattgcctctctgtcactcttgctgcctacctaactctggatcaggcatttgcatgtttcatcctggcacctccaaggtgctgcggaacactttaacagacagacaaacaaattcaccatcaagtggtttcacctcttgccaagacaattattcgtgacagcaggccagctgatggagccataaactctaaagggttgggaggtgggggaggggtgttgaggaggcacccgcagggttaaacagcggccagccattcagcgagtactgtgagtacacaccacccaatccctagggttgctaggaaaaaaaaaaatcctcctaatgctggctgcttggcaaagtggtgacagaggctgccaaatgggcaagaagaggtcccactttggatgtcacttgatttgtagagctggtgcagagaggcagaagagttgagtgttggcaagaaagaaagggaataaaattaaattcactgatttatatgtgagttttcttctaagtgtgctactcaaaacttacaagatgctcctaggctgtaattaaaataaataaattatatatatatattatatataaatatatattttctatatattgctttttgcattattatcctgcaaatcatttcatctatatggtatctttaagcctttcccacctctaatgtggcaagtttgcatcttttctacagttttaaaccccttggcagaaccgtatacattaacagattgaaatgagctttattgaaatttagctattctaagtcatctaagttgcagaatcccaatttattatgtatttaaagcataccagcactgattaaatcaatgcaaattaggttaaataagaacaacatgaatcgagtgtttcagcaaagttgaatcgagaaacgacaacttttgagtcaccacagcaagtcgatatggctgtttttcatgagttttaatttcatgcctgtaagtgtccaatgaactaaaaaaggaaaaaaagaaaaaaaaagctcacctgaagttttttttctttcctcctgcttattctctcatatgtctgtacctgtcttttgaaaatatctgattcaccaggttacaatgtagctattgcatgtactggatcaatctcttcttcccgggtgaccatagatttctgttggcaaacttcttcttcaaatgttgtatattggataagagatgctttatatgctttgaaaatacccttgacattttccatgtttgtcaggggaaggaacctgagctcatctagctgaaccgctatagctgcaagtctagtactaatagttgggcatcaagaataccatcccaagccatcatgccaacatgtgattgggcactgaggccagacctccagtttggggtaagaaatgataagaatcttgaaaatatggattcagcaaatgggaaggaagtctgggttatatgagttatgaatctgatggccaaacataatctggaactaaggggaggtagaagagagaagctcatggagcaaattcgttgtagttagagaggccagaagtatagcttgacggagggaagagtcgattaattccttctctcttcaaccttgtaaattagcctttgcctaatgagccctcctgtttttcgtggtactctatgttgtgaagtggagtgggggagtaacatacaattttttttttggtatgtcattacttctgttttatctcaacacttccaatttgttcattttagtcaaaataatttgtgaacacagaggtgcaagtgcagaaagtctgaaatgaatctgcattctggggattggctttccattagcaatctttgtcaatgttcaaggaaggaaatttgagtgattattttaatgttctgtcatcgctagcaccagcctggaccttgatctttatgctgttgtctttaattttcagtggcagcgaaccatggcttttctttaaaaggaaacctttagaagaattggcggagagtgggagtcacaatttcaaaaagagagaattaactttgttgtttctgtgggcacataccatacagctggcattttacagaatgctcaaaaggtgcatggagaggctgagggtgggggccccaaggctgctctcaggagatccacttaggagaaacaaattagaaattgaggtcattctacttatcaaactttgtccaactcttaaagcaacgtggtaacatggatagcaataagaaactaactgccatgctctatgaatgatgtaaatgatgagaataaataataaaagaaataataaatgaattaataataataaatagaaatgcaagttctcctgggcatggtgactcatgcctgtaatcccagcactttgggaggctgaggtgggcagatcatctgaggtcaggagtttgaggccagcctggccaacatggtgaaacctgtgaaaccccctctctactaaaactacaaaaattagccaggcgtggtggtgggtgcctgtaatcccagctactcaggaggctgaggcaggagaatcacttgaacctgggaggtggaggttgcagtgagccgagatcacgccactgcattccagcctggacaacagagtgagactctgtctcagaaaaaggaaaaaagaaaaaaaagagagagagagagagaaagaaaagaaagaaatgccagttcatgaggcctgtcctccctctccacaggttttctctatactggtgtagagaacatactggtgctctgattatgccatgttatgcttacctatgtttttatattctctccatctttgcttaccttcattttaactatccttcaaggttgatggcaaatctcctctatgatttcttaactgactccgaggcccctgccctctataaagcaatccctttttcttcttctgaactccattagcagcttacttttatcaatcttgtggtcctgttcactttatatgagtgtggcaataatttctaatgatagtattttaaaactgaaagggacattaaacatcttggagataaagaataaaaagaccttgttgggatttctgctttgccactttttaatcggtataaccctatacaagtcacttcttggtcagtgaaatagggctaaggatggctatctcagaggatacttggggtaattaaatgaaatcatgtaaactctatagagtttgttcatttaatttttgtcacttctgtgtttctctatttacatttttttttgtttttgagacggagtctcgcacggtcacccaggctggagtgcagtggcatgatctcgggtcactgcaacctccttctcccgggttcaagtgattatcctgcctcagcctcccaagtagctgggattacaggcgcccgccaccacacccagctaccacatctcaaaaaaaaaaaaatgtaaatagagaaacacagaagtcacaaagattaaatgaacaaactctaatagagtttggccactcaaaagtgtaggcctgagaccacaaaccttggagcttattagaaatgtagattctcaggcctctccccagacccatggaatcaaatctgcatttaaccattagccccaggtaattaaattttgagatgcattattggaacattcacaaattttaacctgaaataaaaacccagatatcattgattccctagttttgtaattgagaagctaaagggacagaaatgttaagtgattgcccacccttgctagtggaattgggtccaaaaaaataaaactttctgaataatgtgttttctctcctattagattttaaacacttagaatggaaagtctatgtgtaccacaggcctgagcacttagcagggctcttaaagtttgattttgtaattggtacagcaggcagtgtagagccttcataggtgctagctttaggtatctttcagctggtttattcccatattatcctaggagataatggtattctgacatctggcataagactttgattgcagtcttccaaggcaggcagagttgcatggtaattgatcccatggggcagcccaacatgttgccccttcacacatacaattttggaagagtcaagacagcagggacaagtgaggggaggtaagttggaggtgcattagggttgtctttctgggaaaagctttgatgttaacagagtttgcttacattactcctcagttttcttatcactgccaatctgctactatggcatgtgtgtatttctcatgaatactttattataaaaaatgtactttgggaggccgaggcgggtggatcacttgaggtcaggagttctagaccagcctgaccaacatgatgaaaccctgtctctactgaaaatacaaaaaattagctgggcctggtgacgggcgcctgtaatcccagctacttgggaagctgaggcaggagaatcacttgaacccgggaggcggatgttgcagtgatctgagatcgcgctactgcactccagcctgggtgacagtgcgagactccatctcaaaaaaaaaaaaaaaaaatgtaaatagagaaacacagaagtgacaaaaattaaatgaacatgaagtcacctaaaattcaatcaccagagatgaactattaagttttgggtatacattctttcagaatttgtctgctcttatttattaattaggttgtttctggtttttagtcattataaaatttactgtgattaatatccttatacctttgaatatatgggcgcccatgcctttaaatgtttattctagaagtggaattggtgttcaaaggatgaggattttaaaaaaactattaatacataatgccaaattgtcatcctgaaagatttcacacttttcatcctcaatagttgctttgctgctttctctttgccttgagaaacccccatgataccataaattaaaacatgttttggggcccctctccttcatctggctggggccccgacctgtatttctgtctgcctttgtttattatgccttggaatcattcttcctcttcacacccatttcctcattccatcctatgaaggcaattcccacttcagaaagagggctggcttggggccttcaagattccttctgggagtttacgtggacttaattcctgcatcttattaagtagctggccagccaaattattttcacaaagccattaatatctgaaaatggattaatccagcattacttaaaatgctctacgagggtaaaagtatttaaatgcatttgtgaaatgcacaaggctttgttctgttgttcctgtttcactctcataagaaatctcagtctcacaatctcagttgtaagaaatcttgtttttcatggtttcagccatttatttgggatttctattaacactaaaccagaacagttttgaaaacttatttaattgcagtttatattgcatttgactttaaactggctatcactttaccaagacattccaaggttcagatttcaagcattatagaagaatgctggtgcaggaacctgttttatgtcataattttatcaattatgggggatacctagacaactacagttcttctacttgctattagcaaatttcaccttctcatcctagccataaataaaggaactgttagaaatgcttgttcctcattgccacaaagaaatagcattcgaacataaatttgattctctcagcaaggcagtttttactttcttcagaaagggtgctcatcgcagatggaacaatggccagagcacacctggacagaggaggggcaggagttcttactccttacgcaggtagcccctactgctgtgtggttcccctattggctagggttggaccgcacagtctaagctaattctgatgggctatttaaagagggcgggggtatgagccagagtagcggggtgagtagttggtggggacaacggttagaaacaggtaactaaaagtgacttaggtcagagcaggtgaccaagggtgactcaggtcaaagcaggtgaccagaatgagtcaggacagagcagatgaccaggggaacagatgtgaactactgattaggactagtgggaaagttgtttactgaaactagaagcaagtgggcaaagagaaccaggaagttaaactttaaaatggagaatcaaagaataagagagctgaacctactgacgtactgattttgtgaagagaaacttggggttcaatatatttaacagaaccaatttaattctatagtaagttctgtctgctctgtctctgatattccttgacacttaattatcttgttttatagaattttacagatgttggaaattttgtcctcacagataaaatgaaactctctaagaacagacatattactttctctgtgttttagaccttctaatatctacctttaaagggagaagaagatcagatgtgagagaccagatatagagacatgagaattgccacatagcactagtaaatatgttttctcttctcttagtgcagtctgcgtagttctgggtttgtaaacactctcattgaattgagtttattaactagtttgaatgcttgcctaatcaatagcctgtggaatctaaattaaatataaaaacctctatattacattgacatatagacacaagccattagcccagcaaagccaaaactcttgagttgaagtcacacagattaatgcctttatgtgtggcctcctgttgcagatctattagttgtaggaaatccctcaccatccataagcaacaggtcttcagtggtaaactaacctgcctagttagatgcatttatctcttcattcaagctgtctcactcctcaatctctgacaagaatcttgaaaatgcctttctaattatttaacatacgtgtttgctgctattcttgtttttgttcatttgttgtaagtcagatggaattttacccgatgagaagcagagttagataaaatgtggtgcctaccctgtgtgttcacagttctggagtggagatgatgagtaacaaaccaatattattcatgctatggcagagatgtaaacaagagctgtggttgaagagatttttctagctaattgagcaagaccaggtagaggaaggaagacgaattgaccagatggatggatggagaaggccactccagtcagtaggcaaagtctgtgaaaaaaatatgaagacttctgagatgcataccatgtctggagcacaggtatgcaggagaagggggtaagaaaggagtgtgaatttagtgccagattggaaagactttcaactagaaatatgatttccaaaatgtgagtacaaggaatataattctgatgactcccttgaacatgaatggaggagaaaggatactgaaagcaatgagagcagttggcagactaccatatcttcccaaatgagatactatgtgggctatgttcacattacaaatgggcagggcagcaggtgcaataatagctctgcagtggattgacaaacttttaagtggtactctttccaagaaaggtgatttcaatagatggattgctctaggggagaagggaggcaaggaagagtaggatgtaaaagccagctaagctcacacttggagccaggagtgagcagttgaagatctgaacagacattagagctgcacatatagatcagggagtccctggaatgtgcttggtggctatagtggtggcagtagatgcaaattccagaaagaaagattagaataccagctgatgcacaatcaaaagttttcacagtccagtaaggtaatatctggggtagcagttagatgaggaataacaggaccttgtgttacctacaaagtgcagattttgattaaaagcattcaaattctaatttattacaactgaattttgttagtgagcaaatgatattgtgaactgtattcagcttaaggaataccagtttgcagagcctctaagtgatgattctcaacaagaaagaataggatggggcggaagaagtagagatcgcctcaataggaaggacagtttagtaaaattaggaaacactcccctagtccatagcaagcagcctttaacatatagggatggccatgggactgtcattattatgaacttcatgtggctgtggaagagataaaatatggttgatcctgatagatttggagaggacattggatggtcaagatcaccaacaatgggggaggatgcctgaccatgagtgaagctgcaaaggaaacgtgtaaggatgatgctgtctgcctcatggttctatgtcaatgtctagctggtgttgagtgtatcatttctgaagagggtttgccattggcatatcacatcaatgtaagattattcctttgcggatagaccttatattccttcctcaaacatggaacaaggtgatggctggaggtcatgtccttcagaggcaaatctatatttgcattttagcagaagaatttgagacatctaataacattgtgaaaagcattttcaaatttctgacttcgtattagcctgaaaactgttctgccatttagaagctgtgtgatctgggcaagtgacttaacccctgagcagaaacattcaacatagtaaaacaaaggaaaaatgagttgaattataaaaacagaaaatagttaaaatgctattgcaataactacctatatcaatttctactatgccagggcaaaaatcacaccctatagattgaagaaaaggagggaaaataatcataagcacaaattgcattgtgcccagtatctcagacttttgactgctccctctttagatatctgttcctactttagaggctgcataaaaagcaaaatcaaaatgaaaaaggcagcaacaaacactccaaaacatggtggttaaaacaacaatcactttatttagtttctggcaatatgtgttggctgagtataacttctgtggggaccaggttgactgaaagctgtggtgctcgctcaagtgtccatgatcaactggaaaattagcagaagactggacaatccaggatggcttcactcacagggatggcaattggcagcctgttggctgggactcaactaactttaggttagggtacctgagttctctcccgcatgtcgtctcatcctccagtaggctagctctggtgcaatcaggtggtgattgtagggttccaagagcagcaaaggagaagtcccagtgcgcaaacacttttcaagtctcaccatttggcaaattgctgttgtctgttaactaaagccaatcacatggtcagtctgaatcaaggagtggagaaataggctccacctcttgatgggacgggaagaatttatagttgtttttgcagtttaagtacagcagcagtggtggcttaatattattacaactctaagtatgaaatgctttaaagtgatttttatttctcaagccatgtgactctaacagtatcatccataaacactgaggaccagcagtgcaggtatcacctatggcttgttagaaatgcagaatctcaggccccacccaagacccactgtaacaaatcggaatctacatttttccaagatctccaagtgattcataagcccgctaaggttttagaagcactgtatctttttgctgtttctcctaagtccctttcttagaattgctatcttctcttgttgagtgatagatctttgatttttaaaggtgccagaactgtttccttctgcacaactgaaacagaacaaacacaggtttatacagtaaaacaggttgcttcacagcgtgaatagctagagagagaggatataacatttttatgctcaattgtcctgtgccttttttttaatggaaattgaaaaattaagataacagtacataaatatttaaaaatactgtatttaaccaggcagcaccattcagatattagagcaatttttaaagaagtagaaacagctaggcatgtacttaaactgaccttttccatttctgaaccattacttaactggaccttgattttctgaaggttcaaagattgattctccaacctttagtctgcagtttaaatatctctagaacatgtgcaagtctcgggatactctttaagattttatacaattaataagaccaacacaatttaagcatctggcatgtgccggctgctggtctcccctagtttgtttttaccttaagtctgaacagagagagagaggaaaaagcaattttgcattaaaaccgaatgctgttgttttgtgtgatgtttgcttgccatattctcttctcaaaatgggacaacttctttgaagctataactgatgttcttttaactatatatgctttgaggtcctgttcttgtcaatcagttagccagccaatcaatagttaacaaatatctattgagtacttcacatatgcaggcatattctaggtctggggatacagtggggaacaaaactgagcaacttggtaagcaaatagattaataagataattttaggtactgataaagggaaaattaaagaagaccatctggaagagagaaattgagggactggacctgctttatctacgggtaggcaaggcttccttgaggtggtggtatttgagttgacacctgaatgatgagcaaggggaagccatttaaagtgccatgagatatgcataccaagcagagagaacagaaggtgccaaggcccagacactaaaccagacctggtccaagagactgtaaaatggctagtgtgctcaagtgagtgagacggggatgaagagatgggaaggaggattttgaacacaggatatgctttcttaaagaatccatgcacatttttataaatgttgacaaacattcaccagcatcctcataacctccactagaccttataaagtgattgattgctctgtctcaggcactaaattaaagcactttaatatattaattccatttattcatcaaaattctgtgagatccttccactttcagaatatacaaaggaaatcaaggcacagtaaacttaagctacgtgccttaacacagctggtattgatgatataaagtgatttttctgcattccctacacccttttatggaacaattaagagggctggataccaatcaactttttaactctgtaaaagccaaacttgacccttttaaaatcttcctttccccaggtttagacccaacaagaggcaggatggggcaattcaaactttcctcctggattcccactcctctcggcccccttctaccatctgttgctgtttgcgtagaaaaagaacagaacagaataccgacaaccacacacattcagaaatctcgttttgtatgtgggagtctggcttcattaacaagtttctcaaactctccctgcactacaacaccaatctaaacataactcattgaagtcatgggaataggcaatcatcagcttcatgatgctcagatgtcagtgtccagatacatcacctgctacttccttgtaacctgcttcaagcaggttgtttttctcaagaacctctaaataaatgatgcctatttccatattctctagcctctgcattgtcactctgattctaactcctattaaatttccaccttctttctaaggggtcccattctcactccagactacccctcaccccatctacccctacaaatccgtatgtccacgtattcacccatccattcctcaatcatgtagtgggtacttactctgttttcttaactgtgctaagtgctaagctatataaaatattttagataatagtcttttctttgaagagttcactcactagtaggagaatcatactcccagaagtccatattaatcccctccttctttgagatgttacttatctaaaattaagagagcattttaagtaaatttaaatttactgtattaaattgctctgtgtttgtttctgtgtgcccctcctcccctgttttcctttatgccttctagtttgaaatttctcaagagcaaagtccaggttgtattcctggtgtagtgaagatagagttgggatagttatgtttaggtttgggttttgccacttactagtaatttagggggtaaattccttctctatataaagagtgggagttgggtttgagaatttctaagatcccgttgagctttgacattcatgggtttcatggattcgtgaattctaaaatacctaacaaggtctggaaagtgaaggaaacatgcaatacaaaacttgtttcaaaggcgtttatttttaacttatttatgtggtgggtggttttctaactgaaatgtaacattgtccctggcttatagactgagacagagtaaatttaaaaacaaactattgaaaaatcagattggaccttttttgtgaagctgggcctttcaacagagtgttaggttaggattctttccaagcccgtagagcaatgcagacaagagatagtcccttggtaagccaattctctatttcagccttcttagggtgctaccccttacactagacagtcaacattggcagtatcagaatgatcctagaagaggttttagtgtatgttggaataatccataactgataattttaaaaagataatatgctagtggcttatctctgtgctttagaaggtattatcaaataaagattctcaccctttatcaaaccccatcacagatgggagcctggcctggttgcaactctattcaaatggtcttctgaattcctttgaccatatgcacaggttaactatgttcagacagtaataaccctatatgggtaagtactcattttagaaaaacataattttctaaaagaatttaaattcatcaactacttttaatataattggtatttgaaggatgtctaccaatttggaatataattacctagcaagggctgatggataccaaccagtttttttttgttgttgttgtttttatttcaaacaattaaatagttgttcaacaaaacgagactggcatattgccaaactggccacatctccagacccaaacaggatttgtttcattacataatatggcgaacagtatatttcttctgtagttgttgtgaacattgcaaaggctttagaaatctttctgagatccaagtataccactcaggatattattcaaccaacatggagaacaaagtactgtttactttgatggtttttctctttcagaatctctaagggctgaaaatgaaaagcaatactttgtgactttggtgatgtggatgtagtgagactgtatctgggtctccagttccacaattctgcttttcactctgattctgttcccacctagcaccccatcccaggtgtaataagaattcttgagtcataaagtaaactagatggcatttaccacccacctaaatgaagtggtgtcaggagggttaaaataagacatattcaaaagtcctccagaaatatttgatgttctgtataaagacggtaaccattcacagactgagcctttctgtaaaagtgagagtgtctcttcctgcagcctgctggtaggaaatgaggcaaggttttttatccaactattttgggagcagataagagaggaatggaatgttataaagtaataataagaatgtcagagaataatcttgttctgattctgacatttggcgattgccttcattctggacattatttttcatccaggtaatatttttaaacaactcaacaataaatgtaaagttactgttagaacctaaatttcttcatctaaaaaacaggattaatagtcttgcctcatagcacaacttttaagaaaataaacataaagtgatacatacacagttggtttcacaggtacattctgcagctatgagataattttattgtttttgtcacttttgtaaggaccacttctaaaatagtagatctgcttatagcattgccatttctccttctatttggccaaataagcacattttcccaaagtggggatctatattagaaaaagccttaatgtttaacccacctctgcttttctcttctgacttcagcagctcttgtacctatctctaggattgagccttcaccttctccgaattgtgatacagtcagctgctcgcctcatagagtaattgggtgaggaacagaccatttgaattcaccccccgatgattgccatgtggagaaacccttactttcatttcttgttaaatatcaagtgtgggatgaagagaggcaaccttaaaaatttacttgattagacttagacttaattattaatattagactgagtgattaatatcttgccactttagcattatcatttttaaagtaaatcacagatctcatacataatattttacgcttaaatattttatgtatatattttaaaaagctgtttttacataaccacaatgctgtcattgcagcctagcaaattaatgacattatttaatgttatctgtatatatagtccatatttagatgtgtccaattatttctcaatttttttaaagttgaatgagttttaatgtgtaaccaaaatatgtctccacatttcattagggtggtgatgtctttaagtggggacagagaagaagaataactctattcagttaagcaaatcagtccaccatagtgtgccaatattaatgtttattcacataatcaaatatttactaaagtttttaaaatatgctagatggcacagatatttggatataacttttttgacatgataggttctctgacatgcccacctgtaaaaatgactgaaagaaatgatataagaaaagttaattatggatataacatggaagaacttgataaaccctcaagtaaatatttagtgtatagattataatagaaaggcctcctggaaaaaaaaaggaaattggagaggctttggaggtttcattgggagggtttagagattttctatcgtagggagatggcactaggaaaagggtattaagatccaggcttgactggtggtgaggatgttctggacgaagtctaactggtaggaacagaaacactcccagtacagtgtatattgaacggagtacagatgctgggggaagtacgcattgagatgaagtgaaagaagtaggttagagctagtgatttgtcttgaatctgttatttctttattgaacagcatattttaaaataatttgtggtgtatgaattcataaaatgtatgcaaatgaactacaaccaggaaaattgtggaataaatcttttttttaaaagcctaccatggtgggcttaaacaatctgtcttttctgatatatcaaaaaagtctgtatatgctacaaccagttagttgtggcaaggtttcgtttttgtgaatgcatgcacgcatgtacttgtgggctctgatgaatgagaaatgctaaatcaccagtaatgggaaatgttaatgtaaattgagtttttactgtgactatgtttaatcaataccttatttctgctaacatgttttgcgaggctggctctggcatggtaggtaatctatactctaggaaaagctatagcccttctgaagattctctgtattttatttatttatttatttatttattttaaaaaggtgtattaggtttcagggtagagtggttattcctcctgctgaggaagcaacaacagaacaaaacatcattttaaatgtgggtgtattttttaagatgaggtttgagacattcctggtatgtgtagaatttcatagaactactttatcaaaacatttagctcactttttttctttctagagagcaaattaattaccatctgataagcatgcttaactttcttctttctagtctactaccaggcttttattagttggagccactaaagcaaactcaatatacgtcactgtcaataaaatgcccagtgattaaaactaggtaatacagtgtcttccctaagcccctcattttatgtagcgtgaaaacagacccatgaatgggtgtagatgtgctgaactggagagaaattgtgccttcctcagctcactctgcacggagccacttccctgaaagccagtgaacctatttaccattgtcatagtaacacacaattcgggcccacgtagacttaatcccgagaggcaattgttcccttgcttgggcggctacgctccccgcggggctgcctgcagcccccgggcccttgcagctccgggacggcgcgcggcggcggaggccgcggggccccaagcgccagcctggccccggcgcagatgcgctgccccggccgcagcccagccgccgcgtgtgttgtcaggacgatcggaaacgcgtgtgtggggagatgggtgccagtgtcgccttgtccattatccaaaacccagtcgcttttgctggttcctcactcagcatgtgagagagattgtcttctcactcggtgccactcgggggccatactccaaaatcaaccaggggctgcctcggcatccaagacgtttcgggccaggcgaggctgtttccctaacctgtgccatgggcaaaagagaacgccgccttcccatgcagttccctttgtagcccaccccttgccattccaggcatcactgaagggtatgtaatttgggaacaggcaaaagggagaacgggtattaaccggagaggaactctagttcttgaagatgagccatattcttgaagagaagtgcgtgccctgtcgtggtcccccaggtgccctgtctctgaggagtgaccagggtcagtgctggcaccggctctgtcactgcacactggtcgcacctttcttctcttctgcttttcgtgtagctcagtggggttcccaaatcacagcacatagcagccgctggcgagagcttttggttttgacttgttagacacgggttagaactccaagcttctgatgtaatagggctccgaacaggcctgggaatctgcgttttgaggcggtctccctaggtggttctgatatgcatccagatgtgagaatcatcgccaagatctcctttctttcttccccttcatttctagcttttcctcttctctctttcctccttgcttgcctgctgtctcacaaatacaactcctcttttattttcccatgtattttcctccctcccccaacgttttaagcatctgttgtgtgtcaggcactgtcctagatgcttggaaggttatgatctctgcctctatgcagcatctgtggtttcttattgaccttctctcttgccagctcctcttctctttctctctgtactttcatcctctcattttcttaatcacgttctttgtgtttcttcttttctttctttttctcctcctcctcctcctccttctttttctattagtgaatccatatgtatttttagcaccatgaatatcaggatttaaaagtttctagcatctgcctgggtttcaagccacaaattcctcccatcatagcttacaggactcctagaccactaggggtgggtggagcaggatattccaccctaactctttacaaggaatttgccttttctagagttcagtatgaaaaaacaagtcaggttactctcagctaacattagtggtatttcagttttcataatgtttaatgacctctttaagcttcccttaaagctgcaattaaagattgcccttcagtcaaaagaaaagcatgtaaaaatggggcttgcatcaagagagaaaaaaacaaataacctctctgaattaatcctccccctaccccccattattcaggctgctgttttacacaaagacactcttttgagcatgaaaaatatgaattgttacaaatttacctgttctaaagtttcaattaaagctaagtgacacatgaatatgaagactgtcagaacctctccaaagttaggtgatttgctttgctttgaagggggtcgacaaaggggctctcttggatcctcgtgggccgctgctcgcagtgtgaggcactttcacgactctcagagtcaagtcataggcgaagtcaggacattctgcttccatgctgagctcatttcttcagctttcctgtggatttgaggtcgagggctgcaatcatcatgacctctgatcgtctcggggttaagcccctacttaaactattaactaacttaaagatttcatgtacaacacaatcagccagcagctatttattaaaaagcctttcatgtaaaaaggtttggaggacctaggaattgtgagaaatgtttaaaaggtgagatgttaattcttggatgtgggggagactgatttacatgaaaagagaactaaattcttagcttcaagtgatttcccagaatgcttggaataaaatactccttttttggcgtgaccttgagactccaaatcatctggaccttgaccacctccctcccctcatcttgctgttactatgtctcttattggttttattccagacacactctttcctttgatctcccccatgcgggatctgttttatgaatgcccttcctcccatctttgcatagccatctccttttcgtcactcaagtttcaatttagaatcactgcctcagagaactcttccctgaccactccatctaaagaaggcatcagatcattatcatagcacctgctttcatgttctgccatggcacatattactactggatattatgttcctatgtatgtatatttctctctcttccccactaaaatataagcttcatgagaacaggggtttcaatgcttctgtcccacctagaagaatgcaaggcattaaaaatatgttcattaaatatatgtcaaatgaataaatgaatgaaagactatgtcacttgccaagtgaggtttttcagacattgaacactagtgtttctagaagagggaagaatcactctaggctgaaggggagaagaattgattagagaggaggagatacctgacttggatactgtagatttgcaggatttatagctatggaaagaaggatgatgagtttctttcaggtaaggaagtatttggcaattaaatgatctaatccattttggcaccaaaccagacattcaagtataggtgaatcctttaaccttagtctccacttttggtcttggaggcaaaactacttgccattctaaagtagaggtaaatctacttgccattctaaatctgtggttcttaaagctgttttttgttttgtatttttcctgatcagagaactttgttatgtcactcaccataacaaaagcagcatcagagaaatcttgtttaaataactgcctctttctctacaatatgagaagggggaaaacattttttcccttcactggcaaagaagatggttatggctgattaatcaggccattagatacagttttgctgcattcagtagaagccatgatgagaatttagcttgaatattcatgttataagtgctacatgagtttggaatgcttatagatttgcaaaatttgagagctaaaaaggaccttagagatcactgagattctgcagcccatcctccctagcatttatcattttacagcttaaaatgccaggacccagagtagtaaagtgattggtttatggttacattggtagctggtgggcaaacagattatcaaccccacccttgtgattctccgtccagcggtctttttattgaaccttagtgagcttcatgcatttggtcatgttacataagcagaaagaaaatctggaagcaatgactaggcatactcatagaagaaaccccatcatcattttcaaagtcgcagtggtgaaagtgagaaatacatattgagggaacttgctggcatttgaaagggaataaagcagtatttgtaagcccttctaagagtaggtagagtacaaattagggaaagtggatgctattgttttactacctctatatattttctacattatccaaaaactgccatgctgaaataataacacactgctataattttgtatcatttaactggcagtacacagtacatggagatttattatttttactaatgagtttagctttgctgttgcaaatagtgtcaaatgtcattcttttcatcctccagcagatggcaactctagtcttcttgtcattttatctatttctatacttagaagatgttgtcctctgccatccctgccccccttgcctctccctgagaagttcatctttatgtactgctcagggtgatatgggtaagtggatccatccctctgccaatggaatcaactccattagcatctgactgtgaaggccaatctaagtgtgcctagaaataacaaaatcacaaattagccaatagttctaatttttttttaaaaaaagagagggggagaagatagagattctaaaataagatgtaccacagaaaactttccatttaaggaaaaaaatcttcaaaagaaacaaaatgtcagtttctccagctctagctttaaaggaagatgggtttgattagattatctgagttactggctaaaaaaaaagagcagtgtcagatttctcatacactgtgatttttggtctctctgctgtctcttctcttccatccctccttcccttttacacactttttctcagttgtcaaaagtactgtgcctagccccctaatttatttgctttttagaaacctggtttctctctctaggtgtgttcctaaggcactaccgctgatgacatttattttctctcctcccagtctttgctcccaccactcccaccccttctcctaccagctagatcctcataactcctacaggattgcagaagttcaaacacatgctgttctctgagtgtaactctgagggcagctgtaagaaatcaacagaaaagaatagctgctactcttttattaaaggaaaagttaatgatcacaggcatgagcaagtggattctgtcaccaattcctcattgtaaggcttcctacagatttgcaaacagatctcctgcctagaggcacttgcttgcatcaggaaggcctgagcagggacatgggacggacacaggatgggaatggatttggtggtctgcaaatgctacgtggagggaactcttgctaactcatcctgttccaaagaacctaaccatcatgtcttcttcaaagttgaagagctgttaccttgatataccaacaactagacagaggctaaagtgtggagcaaggaaacagtaacagtaacatacctcttatttaagacaaaaaaaaaagcaaagttggctttagtgagtatgagtttcttgattattactgtcatcatgtgaaaatgtgagctgacgctgcaaatacaatccttggaaacaacgaggacgtgtggaaatctaagtatgttatcattcactgacaaccactaatgaagacaggggagcttacttcaaacccacaaataattagcactgacaatagaagtataaacagagctttatttaattaattccctaattgttctttcctgctttactatctgcacccctgctttgactttagatataacatatgcccaagacttccttctttcaactttgtgataatcatgtatccgtttgctcagtgtgggaaaccatctgagctagaattcctttccctgctttatatgtataaatgtttttttattttttatgttactttctctgttttcccacaattcggatgcctggaaatgttgacttattaacatggatggcttatctagcactctgttagatgtatttcacagttaatatgaaatgagaagtgaacagttgatgattctggagtgatgaggagagctctctggattctccattctgttctttacagcaacaaactctttgtccctgtctcctcgctcacccacattctaatcccagcaatcagagagcagatggactgcttttttgggttttgtcattatctgtctttgtcagggaagcatgatcagttcctcattaaagggccgataacaactccttctttgctctgtcctgaatgaggaagctgcattggaacctttcatgtggtgacttcaagttgtgtgaggtaaaaaggcatgtttgtgtgtggcaggaaagtgactctccataggggaatggctaggctgaggggccagactgagggacctactgagaggaaggacagtgtagaggggaatagatttggagcagtcatctggagcagcaggtagtccagagagtcagccctagtggctggagtgggtcagccctgatcctcttacagagactgtagactctttctcaagtggctttgctggttatgggcagcctcagctcacaaaagttgattacagccagaagttaaatcagaggctgcttaggaatcttgcctgtgaaaagggctaaatggtgtgtgaatgtatttgtgcatgttgtgtatgtttgatgacagtcatgcttccattattgacaggatatgttctgagaaatgcgttttcattgttggtcgaacatcgtagaatgtacttatacaaacctagatggtatgtatttttttatttatatacatttttcatatggaaaactaaatgtcccagcaccattacggaatataagtcattttcgctacttgatctgcaatgccaatatgaaggaccatgtatcaggtttctatatatgttccattacagtcttatgggattatggtcatatatgcagtccaccattggccaaaatgccattatggagtgtcattatgactgtataagtttatatgtaagtttgtacagtgcagttggtattccttttgattactttttgtataatatttactaaaaatatttgcagaaagttcccgagaatcacacaaactctgtttgcccctgtccatgtgatgtgaagcaggtatcagctgacttcctttcaacctttatttgattggtatttgctggatcatttgggtgaataaccagcctggtgttcatggaaaaatatgcaacaaggagttcctgcttggagaagtaatgttttgtttgaggaaacaagatgtctgttataaacacttagagaaaattctcatattatgtagaagtaaatgaaacagtgtggtaaagactgagaggagatggagaatgatcccattgcaccaggttgctctcattttctctctcttaatgaatggaaaggttgtatagattatttcagacttaaagaatgtgtagttttggtcaaagagcagacacatgggaataaggaagtcatcctgtggtcacagaggatgtagggaacaggttggccagactgaaacggaagggctgtgttaggatgcggtgggaagtaaggagaatacctaccttaacaagtcaggacagggtgtgcctccagatacatttgcacttccctcctgagagcttttctttgtcctgaatgaggaagcaacattggaacctttgatgtggtgacttcaagttgtgtgaggtaaaagggcatgtttgtgtgcggcaggaaagtgactgtccataggggaatggctcagtatgtatgttccctagccacaagcttcggttttgtattcgactgtacctgcctagatatagatccactctggaaacccagggaaacttttcaatcttcttgttaaagctgaggattgattagcaagcatgacctcccacctgttataactggcttatggctcttccgaagtacccactggcattttcaaggtgccctgcaccccttcctgccatgtccttctatggaacacttccttcaactccttgagtctggtcccttcctaccagaaccaaataattgtcaaacttcttcatttgtttggattttccactctaagctcttcttctggcctttccaccagtggtcttacactagcagttaatttgctcggaattcattgtggagctatcttgtgccaagcaaggtgccaaaggttttacatatgttcactttcttagtcttcctaataatcctttaaagtggatctacttaacagtacctgctgagcgtcaattacatgacaaagcatttggggataaaacaggaaaaaataaaggcagaggccatgcccacagataacttgtacttagctaagagactacttctagtgggagagattaagccctgaggaggttataagatttgtcctggatctgaaatttgaatctaggtctttctgaccccaaagtcattaatttcccaactgcatctacttttttctttttttttttttgcaattgaaattaatttaaaataaattattcttagccattgttcatttgaaggcaagctgacaatcaggccgtttaagccagagtgagtcttatgtgacaaattatcacataaagtaatgaagtcttttctggactctatgctctgctgtgggtggagtgttaagcccttcagaagctgccttccagggtctccacaggtccaggggtccattgccaccaagagtcttgttgttcattattgcgtttactactatagcaacggctccaccagtgtctttattaaaacttgctccaggctagaattttcccccggggtcagtaatgagtttagaggaatggatgtggaaatgagatttgttctcaccagtggagtgaattatgtcttgttggggcccccaggctaatatttcagatttgccacaaggtacttcatcaaaaattctattttggttccaaaaggaccatgcatgcctattagcaaattcagagcatgcctttaaactgtatgttttttttttttttttttccttccccggctgcatccactaaaggctttcagaattagcagtttgtgagaacagtccatttccacgggccagtgaatggtgcaaagaagaagtgcagcccttttatctaacaaggctgagtctgccataactgaggtgaatcaaaggcagagcagccacgactgtgtcagcacattaggtattcgttatcacatcgggcatgcggtaccacgccagacatactcatgtggcaggatttgtgtttgctgtctctcaaattctcttgcctccgtttgattgccagggctcattttaatgccatccaagcgtatgggtttaaatactctccaattcagcctggtgtgtttgacatctagttcaacattccaaagaaactgattgcagagataagtcgattgggaaatagggttgcacatcaaagcactacctttccagtaacagagatgctcagaaggcctagcttattggagaggaccataattgctggttgtctttacaagtgttctctgtggtgggaaatggggagaaagcatctcttgcatgatgcccactatgctcacatcctctctccctcccttcactacttctgctatctcccagataaagggttatattcccgagcaatgatgaccaactacttttcgctagcaaaaaccaaaagggcagggtgatctccacccgatgacagataaaagatggattggcttgagaaaagagtgagggtccccactttttcttcccaatccccattacattcatagccttaagaactgctcccctccagaatcttggctatgattgtcataacttacaccttgtctcgatctgggaaaaaataataaaatgactccattgatgctactccaatccttctgcttgttgtgtcaaattttctttcattttgtaagctgtgcatttgggcagatgctatcctccactggaggtaccattcccgtgcaggagtaaggtttctgttggacaggagtcctcttggcagaacacatttaatggagtgccttttagtgagggtctccagccttggtctaattgctctataatgaaacaagcaggaatgacactgtccttctcacttacatgtcttagtttacttttggaaattattgtgtgcattgaacagtgtttctccttaaacaaacaaactcactcactgtttctatgaccagtgtagagttccagatactgttgaacaggcattactatattaagtcctgtgcacatcatcagcactgtaaattggccctcacctcccatgaagctggcagcctctggatctttgggttgtctgtttttactggctgttaattgttaatagattttcaggtgtaggtcatgctgtgtaggcatcaatccttaatttaggaaggtctgcggctgtccatgattgtgaaaaggcaagtgataaacaaaaactggagaaatctcagcatcctcactaaaaatgtcaagcccagtaatgcttctggtagcaaaagcaaaatttattagtgagagaacaaacttgcctaataaaaaaggagagttaaagagggaaagcagagaaggaaggaaggccccagaagaaggttgacgaaagagaaaacatttaagaaatcaaagccattttagaaagacgagttagagagcaggcatggtatgatcttagatatcttccttgttcttgagacaagaagaaaaggaaggcatttagcgtgagcttttaagtaattctgcttggaaaaatgtatgataagaggccttgctatcctccatctcaggggaatgaatatactggtccagggttcagtggccctaaagccaaattcagctgctgcctgtttttatagggcctgcaagataagaatgagtttatgtttttaaatggctggaaataaaccaaaagaagaataatattttgcgacatttgaaaattatataaaattcagattttagtatccatacacaaagtttcgttggaacacagccatacctatttgtttacatattttctatgactgtctattcattaaaatagaagagcagattccttgcaacagagactgcagagcctaaaatatttactattaatatcagccctttacaggaaaagttttcggatccctgtattggtctattgactcagagtaactaggaattagttactaaaggctgtcacctttccaccggtctgtctaaccctccttcatctagtcttcccttagcagaaggtaatccccttacctacttacccatttactcacctacttccaagagtttccaagggcttatctcatggtggatcctgcgttgggctttgtgggtgattgaagagatgaattcaatctggtgtctgctctagagtacttatagtttgtttagagagcatgtgaggaagagcaagataaatgatggagataaataagagatatgcatgatcaaaatacttggtagagtgacacattcgtataagaggatttcaggaaaactgacatgagattctgaatctccttcagattccttttacctgcataataccattggtcagtgagttgctcagaccagaaagccagccaccaccttttttttcttcttttttctgggggaggtggtgggggggatggagtcttgctgtgtcccacaggcagtagcgtgatcccggctccctgcaatctctgcctcctggattcaacaattctcctgcctcagactctgagtggctgggattgcaggtgcgcaccatcatgcccagctaatttttgtatttttactagagacgggtttcgccatgttggccagtctggtctcaaactcctggcctcaagtgatccgcctgtctcagcctcccaaagtgctgggattataggcgcgagccaccacacccggcctagccactgtctttgacacccagtcacctgctgcctctgcttgcactgcagtgctccctgcacagtgttgcacgtcaaaggcactctccagggttatgcttagcccatgtggccaactgtggcagccttgcctttccaactccctggacctttctgctgtcagaatgaattatgtcatttcttccttttgaagaatatcttttgaattgtcagtttagctccatttctgatgcttcctccctaatctaggccactgttatctctggcctggatctcagctaaagcaatggatctttctcgtccactcttgcatctgttctgtttaaaattcacatataatcatgctacttctctgtgtatgatgagtctcacttttcccatatttcttatgaaaatatcccaaatctgggcatatctcttgagaccttgaacaatcagcttttgagacctcagagcctcatttgcatgactctccccttaattcctttcttctggccatgtggccatcttacagtttctgtagggtgaatatgtaattcatttttcaaaaacaagacacttgtgagaatgaaaggaggcactattaataatgatgccatggcaacaggctataatcaggacagtcccaggcaaaccaagatataaagtcaccctacatttctcagacatcccacactctttctaacatagagtctttgaatgtgattatttttccttatttgtgattgctttgcccttctttacctatcagtttttctctgacttcagagggtgagtgaaatcctctcttgatacacaatcagagcaccttcactccttctaataattataattgaattgcaactgatgtaattgtttatgtgtccaactagcatgaccaatcctcttggtctgcccaggaccgagggagttgcagggacatgagattttaatgttaaaaccaggaatgtcccagatcagcacgtgagaatatcattccctcaaaggcaaggaccagatttgtcttgtttcccactgtaactgcagaacatagagtagttcccaataagttataggtgctcaaaagactttagttggttgaatgaattaagaaagaaaggagtacaatgacagagaggtgactttcagatgggttaatcagggatgctttgcatataaggttccatctcagcttaaaggatgagttacagtttcagtatgaggttaggaaaagaatattgtagacagggagaaaactttcattagagcccgtcctcttttcccactactaagtgccacctggaaaggatgtggagggtcttaacaatgtgatgtaaatggctgctacagttgaatgtgttacctactccaggagtagttgcatttttaataaaaaatagaacctccagtcaaatgatcatctcataatggcagacgttttgaactggggatggagaatatagtttgagggtaagaaagaggagtgaggaggaaggcctaccttcagactggccccaaatgccttatcctgtaggtagcttccactctgcctggggtcagaccacagggctgtggggtctgaaagtacagcgcagtgtacaatcacatcaaaatagtttgggtagagcaccatgggacagcagtctaattgttttttctcaaattttccagaccaattggtctgggagaggttattcctgcctactgtatttctggcatcagtacttggcaccagatgagaagtttgcactgggagagatgacacaatcagaaaggcacattagagctttccaattggtaaaatgttgaataacagaattttcagtgtttcctttagactatataaattccacaagtgagagttcccaattcctgtgaattgaaggcttctgaccatttgatccatatttgtttctgaaaataataggttattagacacaaaaatgcatttgagattcttattttgtagctggggaaaccaagacccagaaaagttaagagttgaccacattgtacagcttgttcatgccacactgggaccaggactcaactctcccaattccaaatgctgtgtctccccttctatacctgcattttattatgaaaactttttaatgtacagaaaaattgaagaaattgtatagtgcacacccatgtactcatgtcttagttcatttttgctgcaataacagactaccttagactggctgacttaaaagcaaaagaaatttatttctcatgattctgaaggctgggaagtccaagattagggctccagcatattcagtgtctggtgagggttcgttcctcatagatgtcaccttctcaccatattcttatagggtgaagggggcaaagcagctctttggggccccttttataaggatcctaattctactcgtgagggctctgaggcctcatctccaagtaccctcacactggggattgggttttaacatatgaatttagggggacgtaagcattcagattatagcaacccgccccctcaattttacaattacaattttgctatacttgctttatcagatatctgtccatcctatttttgaagcatttcaaaagaattgcagacattactacacttcaccttatgcagattattatccaaagtttgatatttgcttatctttttaggtaaaatttatacacaatgaatgagttttgacaaatgcttgcatctatgcatctcaaacccctatatagtactttgagttttccattttaaaaatttcaaaacatgctacattttacttaaacaatcatcttaaaattgtttgctgttgaagatgtacttgtttatatagaaaacattttcacaggaaacagatttgtgtaacattagactatagttttaaaagcaggttccgtaaggtgctctgttcaaatacttaagaagtgactctatgcaagttttaattcatgcaagatgaagtctcaaagtcaaggaaatgcactcatgtgggaaagaagtggagatattcaaaggggatacatgagggatacaaaaccttatagaaaattgagcattgttcccagcccattgctgacttgggcctcctcactcctccatctccacactctgcatctcaaaaaggcaaattacctggaaatgttcaactgggtggggtgtgggcataagaaaatgagacagagctgggcacggtggcttacccctgtaatcccagcactttgggaggccgaggtgggcagatcacgaggtcaggagatcgagaccatcctggttgacatggtgaaaccccgtctctactaaaaatacaaaacattagccgggtgtggtggcacacacctgtagtcccggctactctggaggctgaggcaggggaatcgcttgaacctgggaggctgaggttgcagtgagccaagatcgtgccactgcactctagcctgggcaacagagccagactctgtctcaaaaaaaaaccaaccaaacaaacaaaaaagtaaacgggataaaaaaaaaaagtcacaagctcttttgcttctgctgtaggaatgctctatttgactacactcccccccaccccaccctttttttcttttttgctcctatggaaactaatcagaaaagctagagcagttttgagaggcagatgcagaagaacgatactccacactcccttcacaagctccccttcccacacatgctgcagggtgtgtgagtgcacacacacaaatacacacacacacccctctcctgattgtaccaaggagccaaaaacaactgacttctcatggatgaaactgtgggtgactagtggttcagtactggcttcaggcatgatggattctccctggggaatgcgcacccaacaactgggagacacttcaagcaccttaactgccaatgttttatgtcaaaaggtagagacaagtcataggaggacttgctgcagccccttatagtaagcgaattgaccccaccatgggaagtgggctggtccagaggatagtagcaagcccaaggctgccaaaggcctgctccccaggtggcttcctagagcggaatgtatgggcagcagtaaaatcagaaagggaatgtagtttacttttcttttttttttttgagacagagtgtcactctgttgcccaggctggactgcagtagcacagtttcagctcactgcaacctctgcctcttgggttcaagagattctcctgcctcagcctcccgagtagctgggactacaggtatgtgccaccacgcccggctaatttttatatttgtggtagagacagggttttgccatgttggccaggctgatctcgaactcctgagcttaggtgatcttcccgccttggcttcccaaagtgctgggattactggcatgagcctctgcacctggcctttttttctttttctttttttttttttttcacttttaaagcagataatgggaggggagaaaggattaaaagagggaatattctggaagtctttctgtgggaactccagaaaaccattttggagaaaacagaacatttcagtaacagctgggccttcagccaaagcagatggtccaaaatgaggaatgggagagcagtacaaataatatcaagttgttggctatgggagcactgtgggaacatgctaacagttgggttaggtggaagtccttcaatgctgaccctgcatttaaaaagcatgcatttaggccttctcttttggcatctgagcatggccgactctggagagctgcctccaccactgactggtgaagaaggtgcatcccttttatttttgccaaagccagtccaaatgccctaataaaaacctctaagtgattaacatacagaagaaagtgaatggtgccaacttactgcagtcctggtagttttcctaatgatttgagagagctaggcttgtgattagaattccagtcaccaggcaggatagggggactctagagcttttggataggccaggagcaaaagacataaaaacaacaaaggaacaaatttaaaaatgaaacagcacattaagttgaacaggaatgcacattttctatccctgattacaatcagagctggctatttttagtgtatttctgatgagtctacttcactgtacttcgtaccagaatggcacaatgagtggtatttgctctctattggccagtagctgaaaagatgaatctccatggaagtgtgtatatagggagtgctgaggctgacatatggtagatttttttttaacatctacaaaaacaaaccactttcactaataatataacgtgtgtgtgtgtgcacatgtgtgtgtgtgtatcacacccatccattgagtttcaataatcaactctcttttgcaaggaataaaatatgttatagccagatagtcatcaccaaactatgatttatagtttgagttgcatctaggtggtttatggcactgacctagaaagggtattaatgaggtctatgccaaaactttcagcagatagaatatttgatttttattagagataggtttgggttgaggggccatttttataaactcaatgttaaaagaaaaaaatagaataccataacccaactctccaaatactttctatataaggtgaataccctgacaaatcttatcccagctatgcagagagaagtagaaatacctcttccagtgtggatttagaaattgtaggtacctcaagaatatatgttgcatattgcttcttcaactagtcatcccctactgattaaatacctaccatgggtttggtgctactggagactcaaaagaagagtaaggcaacctgtcttcatggtggtcaatgaattcaccatcttaataaagccatgagaggaaagtgtaagaaacaaaccatttattaacagttaggactaggtataactgaagaaatcagacaacagatgactttgagctaggggagattatttggtttggagtagctcaaagatatttgatcttgatgttttctgtaagcaagtaactccttttgtgtgtctttggggagttcatttcccagacattttaatctaagaatgacgcctttacattggaacaccaccaagttattaacgtagctttcttaacagtggtggccattgtgcttacaaagtatatgcagctttttcatcaaacatacaagtaattgcagagaaaataaataagatttatttttcttctttcgactgacaaggcttaatctgtctcatgcaatctttatcacttgaagtcaggctacccctctcagtacttgccagattcttcatggacgtggataataactataatctatggagcagtcctgcggttatgtcagtacagccagtaatttgcaagcctggttctacaatggcatctcttaggggaggaactgccttgagcttgctcatctgtctgaaccctgtagagaaggatcagccaactggtaactttcagtgaggtttctcatggccttttgctgtcttcaagtttatggctttaagagaggcctttggcaaagttttgattgctgtgaataccctcttataatggttcacttttcaaaaggttttgacgttcataattttctttaatcttcataattttctactagattgggaagaattgagtctcttcccattttatctctcatgaaagagaaacaacaaggctagttgaatgtaccaggtgacatacagccctttagccatacaatgatgatcacatcaaggtttccagaccacagacttagagtctcattctatctcctgtgtgggacctagaacttgtttgattagttctgttgacaattatatacaggctttgggaaacaagttataaatatttgactttttggttggtgcaaaaattccattcaattctgacattatctacctggagctagcatcagatctcatgagttaaaggtctcagttccacaataatgcccccatgtcatactccaatctcaaatcctggaccacccatacttctgaccgactgtctataaattgggggttctcatcatcccctcctcagattcggtaattagctaggaaggctcatagaagtcaggaaggcatttaacttaactttaccagtttattataaaggaaacaaatgaacagccagatgaaggagtacacagggcaaggtccagaagactcctgaatacaggatcttctgtctctgtggagttggggtgcacctcccccagaatgtgtatgtgtttggaacaacaacttggaagttctctgaaccttgatgtttagagatttttttttaatggaggtttcatcatataggcatgatttgttaaatcattggccacccaagctccagctcctacctcctccccagaggtggggatgaggggctgaaatttacatgcttttagtcatggtttggtctttttggcaaacagcccccatgctgaagctatctagggactaccagtcatctcattaatatagaaaagacgctcatcactctagagcttccaagcgttttagaagctgtgtgacaggaacaaaggatgaagactaaatattttttattatactagagatttgaatagatatttatccagaaagacatgcaaatggctaataagcacatgaaaatatcctcaacatcattacccattagggaaatgcaaatcaaaaccatagtgagattctacttcacacccactaggatggctataatcaaaaaagaagatggacaataataagtgtgggagaggatatggagaaattagaaccctcactcattgctgataggaatgtagaatggtacagctactttgcaaaatagttcggtaggttctcaagttgctaaatatagagttaccatatgatccagtaattccatttctgggcataatccaagagataggaaaacacacatccacacacacttgcacatgaatgttcatacagcattattcacaacagccaaaaattgcagagaacacaaatgtctgctgcctgatgaatagaaaagcaaaatatggtatagccatgcaatggaatataattcagcaataaaaaagaatgaagtagtaatgcatgctacaacatagacgaaccttaaaaacattgtgctaagtaaaggaagatagtcacaaaagactgtgtattgtacaatttcatttatattacatatccagaacaggcaaatctagagacagaaagtagattagtgactgtctatggctggaggaaagggtagagggaataggaaatgattggtaatgggtaaccaatttattttggggaagataaaagtgtctacatgtagagagtgctgatggttgcacaactctgaactcattaaattgtatgctttgagtgaattttatggcatatccattgcatctaaataaagatgtttagaaaaatcagcaaatagtatcacctggagttgggccatccagacaacatataagtacatctaaaattaagtctccaagcactgcaattctcatttgccctctgatgaacttggtgaactggaacttgaagtcagttcttgtaaataaacaatgctgctgctgtaagagctaattgacagtgtcgtcagattggctttgccagggagcaagcagtcatggtcatcctgaaattaacatacaaattacaatgatagattttatttgaagagttttattttttcctgattataaaaatagtttctttccaggcaaataaaatgtttcatgcactgaaataatcaactgccacctaattttttttaaaatctttcttttcatacaaaatttcaaattatgaaaaaaaatgcagagtgccagttttttgtttgcatgttttttgtttactcatttaatgttttaacaaagacctcaattctatttactaaattttaagtgtattgattttctagagggtatcggaacaaaatactacacattgggtagcttaaacaacagaaatgtattgtgtcacagttcgggaggacagaggtccaagatcaaggtatcagcatgggaggttcctactgaaggttgtgagggatggtctgtaccattcttctctcctagcttctggtagcctcaaatgttgtttgacttgtaggtggtgatctccctgtgtccctgtgaaagaacggagtgatctttctatgtgtgtctgtctctatgtccaaatttccccttttctatgaggaaacagttacattgggttagggcatatctaatgacctcatcttaatttgatcatctgcaaagacactattttcaaatgtagtcacattcacaggtaccagaggttatgacttcaacatcagttggagagacacaattcaatccataacactacgtcacattctagggcttataattttttaatattctcttggcctagctaaaattataattttaatcagaggaatccattgtaatgaggcaagaatagatgttctcttaagatcatccatgtatgaattgaagtttacctgggctcctttgactgactttgtcattttccatctggtgacttttgataaaaaaaaaaaaaaaaacacataaaaaaaatctccagtgttccaagcctgcagagaaaaaaggatgaaaatgattatataattgggaagttttattatcctctggttttgtgtcatttacttctgtaacactgtttttatcgactgccaagaaatgtatgtgtgttaccatttctttgatcgtcttggcctgcaaattcaggataaagggcacaaggaaaaaacaaacttaccattttcacacaattatttataagaaaaataggactggaacccatttctgatcacgatccttttgaaccaataaaaggaattactaaaaatgtaaggagtgatgttttttctctcgcaattggtactttggctaaaaataaaccagtcaaaaatagaaagaaaagaagatgggtaaggtctgttaagaaacctaaacaatattctgtggcatcatttctatcagcacacaaacatctaaattctccctcacacacttatatatataacttgacttcagtatctctctagctatttccccattcctttatccctttggtaacaaaacttcttaagggaagagctattccagtatttgtattcacccattctctcttgaggcctctccaatcaggcttttagcacctgcactctgccccaacctacccttgtgaaggtcctgaatccaatggaggactctcagcccacctcttactcactatcagcagcttgggcacacttgatccttttcttcttgaaatacttctttcaattggcttccggaactcacaagctcctgattttctcctccttcatggatttcttttttttcattccatattaggtccttctcatctccctgatctcttaactctggagggcttcctacctcagtctttggacattttcgtagatgcacacccacacccttagtgatcttctccagggtcagggtttaaatatcatctttttgttgctgactcccaaatttatgtctttaactcaagcttacctgctaaactccagatccctatatccaactacctatgaaatgtcaacacatgaatgttttattggtgtctcaatcttaacattcccaaatgtcttccctcagtctcactctgccacccaggctggagtgcagtgccatgatcttggctcactgaagcctcgatctcccaggcacaggtgatcctcctgccccagcatcccaagtagctgagaccatggccctgcgccaccacgcccagctatctttttgtattttttgtagatgtggtgtttctccatgttgcccaggctggtcttgagctcctgagctcaagtgattctcccttcttggcttcccaaagtgctgagattacaggtgtgagccacaacacatggcctccgaaactaaattagtgaccatccctctctatctgctcttcccaagtccatcaaagtcaactctatcgtcctagtgctttatcccaaaagccttggggtcccttcatcctctcatattccatgtctaatctattagcaaactctgttgcctctacactgaaatagatctgggcacttactgtttctcaccacttccgatcactaccaaatctccatcattttgcatcagaatttttacaaatacttcctaatggctctccctatattcacctttgccaccctctttccaggtctattctcaacacaatagccagagtgatccttagaaaatctaactagaatgaatcatttctcttctcaaaaccctccagtggtttgccaaaatcattacagtggtctatagctgccacatctgtggccccctcccccttatctcacagatgttaccttccactgctcttcttcattcagctcctggcacactagccccattgccattctcagcaatgttcctgcttcagagccatttacatctgcaggtccttctgtctggaaggcccttgccccactgacattcatgacttgtttctccagcccctcagtctttgctcaagtggcacctcctccataagaccttccttgtctgtactgttctaaatcacaattcccaagccttggcttttatctctgctttattttctcggtatcatttatcatcatctggtgtgctatctattttacttattttattaattgtttgcatcctcccagaagaatgtaagcttctaggaggcagggatatttgtatgtttagttcactgctatatcatcagtgcccggaagagtacctgatgcatggtagggactaatttaaaaaaaaaaaattgaatgaatgactcaatagttcttaatcttttctagcttacagactatgaactattttaaaatttgatgaaatctatggaaacttttttttagaaaaagttatacccacataatttgtactaaaattctaaagctaatgtatcttcttaaatttttccaaggatgttttccacacccaagaactcctgtttaatcatacgtggcctagaggaagaggcaaagtataaagccaaactctactattgtctgttggatgattgctactgcttaaatcatggtggcctgcagattgaggataaagggcataaggagaaaataattttccattttcacacaattatttataagaaagataaaactggaactcatttctgatcacaatttttttgaaccatttaattgaactacaggaattcagatctgtttatttattttgtttcggggacttaatttcgctagcataattttacaagggggaaaatcatgtttgaactcttttgtattaggccattcttgcattgctttaaagaaacacctgtgactgtgtaatttataagaaaagaggtttaattggatcatggttctgcaggctgtacaggaagcatggctctggcctctgcttctgggaaggccccaggaagcttttactcatggtagaaggtgaagtgggagcaggcaagagtaaaagagagagagtgcccggggagaggtgccacacacttttaaatgaccagatcttgtgtgaactcagagatctcacttatcaccatggggatggcacaagccattcatgagggacctgccttcatgatccgaacaccttccaccaggtccaccctccaacattggggattacaattcaacatgaaattggggtggggacaaatatccaaactgtatcacctttgtagctttctgcttatactcctcaagttcttccattttcctttctctcagcatcggagtgcctgattttattgataaggggttcagtttgatcatgatgcatttccaaagctccctttctctcttcccaaggtatttatctaaatttcacaaaccttaaaaaggaaatgcctacaagatcatgtttgaaagaggtttatgtaaatgtccaggaatgaaattattttaatttctgcctttccaatttaaaattctgtattcatctcctaggtaggtacccccatgtgttgaataaaatggcacatttgttgctgagaagttctaagacagcagaattttgccctcagcacttcttaaggaaaatggtctctgtgaattaaggatttatgggtgaccatgcttccgctagaaaggtttgaagatctggacttacatgctgggatcctgtcttgattaaaggctgcagagaagctgatacagtaaatagtctttgctatctgtggactcatatttcctgctagagataaaccaagctttgtgctatatagcaatcagcgagcaccgcagtggcagattcagcgctctgcccctactaggctgacaccttcaattggaaatggcctcaaaatcatgaatgttcacttcggagttacaggacgtggggatgagttgaatgtattcctccatgtgaacacttggtcactttccccacattacactgtaaaaccaatttttgtggttttatttctctgagtcctcattaatgccatttaacaggaaattcagctaaagccccaagacaagtgtagagatttcgaagaaaacttgctttggactgctttagcagagtgcctgtgtattatatatgtgcccacgaatgtcatcaccaggggagaggagcagtcacatgaacgatccaacctaattcatttatatttgattttgaaatgcacagcgctccttagactctcagtaacttttcatggaggtgggaggggtaatagtaagaggagcatgtgttctttgagctcacattgcataatggaaataagcaacaaactgtatctgacattccatgtggatacttagctgttgacactggatttagggttgctactcaaagtgtagttccggagcagtagcatcagaataccctagaagctttttggaaggcagtttctggtgtccacacctcaggatctttattttaacaagatccccagctgattcatttgcacattatcttttcctttttcttttcttttctttttttttttccagaagggttgtttaaagccctgtttcccaaacatggctgtgcattgggagcaccttggggggagtttttaaaatactgattgacacctgggtcctgcagtcagagtgcccgattttattggtatgggattcagttcgatcatgatgggtttccaaagctccccaggtggttgtaaggtacaacagagtttgagagcctctagttcagagcagaaccagaatgcatctcaggcacatgtgaatggtgaagagttgacaatttctgaaacagactttcaatttgtgacctggcattctaccagccacaaatttttatttgtgttttatccactcatatgttagctgtcttcttaatcaccagagacaagtaagttatctatttagtttactgctttttctattttatctgcttatttgaaaattgatggatagctttggtttatatggttattctagaccagtcaaaagatttgcttaattgaatttcatttccgaatatgttttcagagggaaggttatggtctaaagaatgtcatttaaaggtcttaccaatgctatgcagtagttatttctcttaaagcagcaagagctgagatttcaaaaagttaaataactgcctaaattgcacagccggtcattggaaaagccagaggttgaacttggcatttgaaaagtctttatctgattcctaaagcccgtacttttctgatcctccatgctgtttctggaaaaacgtagctgtgtatgattaacagcaactttaaaaagagcatttctggtttatttttgtgtagccttatgcagtgtacacatagacatgtgtagctttttgaaattttgtgtaagacattccaccaaccatcactgagtaaacgtagtatatgcccttaggttctgatttaaataacaacaaacaagcagagaagttaggggaattgaaggtgactgaggagcacaaggtattgagatgtttgttaggtgcgctgggtagggtagcttgaaagaatttgcaagaggtagatgcttcactaagagctgctgctctagtcagattggaaggaagcaacagaggaaagacaagctttagaagaaaggaaaaagtactactatcagaaatactaaaaggttatttcagattgtatattgcagcagatggcacaatgtaaaggacaaatggattaacttgctgagatttttggtgtccacttcatagccagccatgaaaggcacttaacaaagcagtgactttgttaaatgatagcttccagaacatgccatctgtggtccctgactgttctcattgcctgatgaagactggaattgttctgtctgaaaatgcagagtctttcatctggttgttttcatatccttgtgaattcttttctgagattgaatttctgtatatctgagaaggaccttggcttataaacatctttgctcccaatggcttcatgtttctccatagcatcacactgagagaatgctagcaaaaaggcagctttgttgatttgttgattcgtttgtgtattggggatgggtatattctggcataaactattctaaacttgatgctgaaaccctaggaaagccaaaaaggagatcctggtaggggagttctggccccaggttctgattaccatttcctgttacaatcaccatgtttatgagtaatatgcagaagcagagatcttcccaccttcctttttttttcctgttttccaggtctcccctcagtttgtctttatttctttaacttccactgcctcccactttattttcactggtatcttgttatatccctagattctaccctttcttctgttcattttaatgaatgaattaattaaatcgatggggtcttgctatgttgcttaggctggtcttgaattgttgggctcaagctatcatcctgccttagcctccggagttgctggcattcaggcatgagccaccatactgggctctcctgttcattttctcttctcccatcttttcacctttgaattgccactctcctcccttatcttttttgattaagaagttttatttcaacttatttgaaattgtgatggctagtccaggggctaaattgaagctgattttcatacagtctatatttatgaaagattttctaaaatattttattaacagcaacaataaattctaggaagatatttaaaatacaatggagtatgaatgaatcttcaattctgtagaagcatcatttaaatataaatataactgcagagcaagagaaggtattctttaaactatcatgcttcagatctaggggtgtgcttttggcatttttgagtggataaattttcagtatgagggaatgctgggctttgacagaaagtttggaatccttggccctgaacactaaatgcccatagtgccaactgagtcatttgacagtcaaggacatttacacagatttccgaatgaaatggtaagttttattttattgtagcattcttattctctatgttaaatctaaaatagtttctttaaaactgtgccatcatttagatagatgcccgctaatcatttgttcagatttcttatgcttactgcaaaataattatgtagacatgtcagtgttaaagatcaagtgcaacgcagttgctacaagaagtggcacatagagcattcatcattctagttaaacacaaaggagcttgtcctgattacatgaatgctagctttctattccttgaatgaacctctccaagtaagactaagagtccataccttgtagtaatttataatgtgaaaaaatatttttctacctaggattttaatgaaaattaaataaatgaatgtggtaaagcacttggagccaatttgaactctggcattgccttgattatatctggaagataactgcttacccacctccagtgccccaacaaccatggctcaatgactgttttcatgaatcgaggaatttgagatcctctgttaatattaacagcagcctcaagcgtgacagaagtcttctagatgtctgaatccaacacctgcacttttcaaaatgggggactttagtaaaaactctcatgtgacaataatttttgaaacaactccaaataaggcataatgcagggtttaagctaacacttcagatgacctaaagcctgaactgaagaaagcaagtgagtttgatcattattctttctcgtgatgagctctaacagtcacttatatgcattttgttagaacactcctacaaccattgagaacagaataaaagaataaaaagaaacagattcctactatagcaagtgagatgcaggttaaaaatgaaacacatacacacgcacagacatacattccagttgcaagtgtgattaaatatgataaaaatagggaaccaaaagtgacctctttccccacataggcagagtggctttttgaactaggaagcattttgttgtctggtcaatagagcctaaatgtaatactcgcctatagccaggggaagaactccatgcctccaacaggtcagtttattattccctgctgtgtctgggttgcagatgagaataaaacctctcacttctatgagatgagtcaacctgcagttcaccatggccacattcctgggaaaatagcttgtcaggagaaatgactaaagaagaccatgtttgacttcaatgctgcccgattggtgaattatatttttagagcaatcagtttaaatcctacagattgaaattgtgctgctcgctaactgcctgggtgatttggcatgaaatttaatttgctttaacatgcatggggggtaagcagaggggcgttaatttcacatttgagagttgctgcggtactttgaaaataactaaaatcgtggtataatactttgctctcatttttcttcttcaaaacaggcgtgatgctctggccaaattcggtactttagtctaccagtttgggctaattttatcttttttccatgattctcactctttctcactttaatgtcagtattaactgagcacttaccatgtgctagttacttgcttagttgatcatctaattaacattcagcatattagccactcaattttatagttggggaaagttgacaactactgaccatttccagacctttcctctctttgcagggacacagagggaagctcgtctaatagggtgctatgcttttgttctttcatgtctgtcttcccagagtggaaccctcattcaccttgagtgtgcccactgcaagggagaattttggaatcaagggttatgtttttaatatttttcgatgtagcaatccagctttcaagtaatataagttagtcctcaaagtcaggtcattttaaagctatttctctgacatgagtaagtcaaggctgagctaatctgaaaatttgcatgctgataacaataaaacaataaaaaaaagtgcttctagtgaattaatgtcttgaacctacatagagagcgacctataaaggagccattttttttattgcctgaggctaatgtaatggatattgaaaatgccttactactctgccatgtaatctacatgtccccaactgatatttccgctggtcagtattcatattaaatgtaaactcaactatagttggtgattagaaagccaactagcagcagtcattgattcaggcaatgagtctaatgccaattgtacttttaggtaaatgttttgataggacacttcatcagcagtaagaattcctccactgggatctttaagtaaatactttgcttctaagaattgtaaaggaatggttgcttggtccccaaaagatcctttcttagggcatgatttattatttaatggattgtggaaatatgccatttcttgaaatgatagtcaatgagtactataaaagatctgaggagaactatgtgcttcatctaattaagctatttatttgagtttattataagacaaatgtatcttcagttgattccattttatggaataccaggcaatgaagatatttttaacttcttcctgatcatatatgatcctccactgtaatttcccatgaattatgtcagatcaagaggttactttaaaaaaaaaaaataaagattccaaaaaagatgtttcttctggggaagtaggttcattacatctattaggacagtacatgtatcagtgcttgagaagacaaaaccctctaaatgagtgttcaggaggtttagatgtgactatgtcttccccaagaaacctagttcatcttgttccaccaaaatgctcaggtcctagagcatctttatcatggccagagcgatcttgctcatcaatcattagtatttcccctccatttagatttagatttagattctccatttagattatcaggcccctgataaatagcaaagtaggtactgggggtagggaagggggtaattttcaagcaataagggacaaaattctgccatgacaatataagactggatacaacagcccaagaactactaccattttctgacttaaaggagttatgtggtagcttggcataagtatgatgaaattgtcttctgttgtcaaatatcggacataccatacaggttagaatcttgttaactattctctcctttctactataacctataatatatagagctaccatgtgtccagttgaattggatacatttaaatttaaaaaatgtatataacacaaagatcacatatcccttaattgaggctctttactcctttatgccactgtgagaacaattctgaacaaatagttaagagacagatgttctagacctacctctgcctctcacatatttaccgcatgagctcataacaggagcatctatatcattacaaaacaatgattatgcaccacttctactttttgcactgagcttttgccaagatcgaatgagataacccaggtgaaagtgctttataaactctaatggcattatgctttgaaaatgtgacattatttagtgccctggagcagcaaggtactaaataatatcttagtggcttgaattaatacagctgccaaaagagcctaatttaggaaattgcttaaatatgaaaaaaataaaacaaaacctcattccacatgcatttttcactgacacaagctctctgtgctccaggtttcaggaggtatgttaatacagccaaaggagggaggtggttgccagggtaaatggaggtaaatgagagaaccagagtttgcccctgagaatttggttaaagcagttaaccactcacaactgagcctctttcagaacttcttcttaaccgtcaactaatgagtcccttgcacttcttcggttgtggcactctaacttcaggagtactcctatccaaacactttattgaaagaaacaaataagacagaaattaaaatgtcatcacgggagaatatcaggggatggaattctagaaggaagtgtacatgtaggagggagttggtgggtgaagatgggaatatactacagaggagaggaagggggaggatatgataaaggtgcttgatttgaaaagtctttttgtccaatgccatcataaccaaatcactcacccactagaagcacaactagaaaagagcatgagtcatatggcctccattttccctcttgcaaacagagtgcatctttagggtggtgtggatttctggagatagaattttgaggggacaaaggtacaagtaaacgcaaacagaattaccagtgttgtgaggattgtgaaagcaaatgggataaggagtttcgggggagttttagaagagaagtcttagggaggatagcatttccgtaatttaaatatttgaatacatgacttgatcatgtgcagaatgatagggaaatatatttccaacacagcatgtgggagattttttttctaataaatagagctgttctctggaagtgatattacttctagatcagtgtttctcaaactcaggtgctaaagctgccggtctgggcccatactctggcagtgagggtctagatcgcccttgcttcagttgtatgccagaagatctgctgtcaggggtgctgggtcagggattgttgctctagatgggagggtggacagagaagtgtgggtgtttctttcacctctaaaccactctaataccttgtacagggagtgcacttagtggtaggattcatggtgtttatttttctgcctcccaatgtccagggcactgatgtggacaggataagggctggtttatcatgtgctagtttaccactgcagtttctgtattagtcaggggccatttggcaatgaatcttcttcctaattgtagcagacatcgctatatgcctaccacatatccattctctctttttttccttagtaatatcactgtccagcctggcaatattctcagctaaaaagcaaaaatgttgactttacagactctcctccggctaggagaagccacatggcatagttttggccaatgagatgtaagcagaagccatctagaacagatcgtttttctgataaaaagtctgcatgctctttttgctcttctcttttccccatcttgcctggcatatgggcataatgtctggaggctcagcagttcctttgtgatgatgaggatgagagctacattctaaggatgatagggatgccaactcgactcccttgggccactgtacaagccctgattagtcttctgaacaacttcttgctatgtaagaacaataagcatcatacttattaagccgctctttattgggttttggctacacgctgccagacacagtcctggctgatattctagtgatcatcatgcctcaggcaggtaacctcttgtcactttagttttagggaaagaccatttctcatcagcaaagatgctccgttgtatatgatgaacttttctatttttgttcccattggacaactttttctttctttcttttttgaactcttatataattttaaaagtcttgttttccatgaacattaaacgaccatttttacttaggtagaacaatttttactgcccagaggttaaaattaatgataccccaaaaaagtattcaccttccatggtctatattgctgggtaaatagcacagtcacattgttcttttttttctcccaaaaagattccatttcttagcctgtccatttcactcttcaaaataatcactgtccacctgctggatccctctttatccttggcaactctgttatgtcaattatataatagtttggccctttttggcttttgtttcactttgtttcttttctctctctgcaaagcagcctgcagagcaataagatagggaacatgcctgctgggcctgattttcttcttgaaaatagctttgaccaatggttagtgataaaagaagttggctgtctataaaagccaaaaaccaggtaagtggatttaacctcacattggcacaaaggtgactaatggacagaaaatggaatctgtatttgctttgaacataaacaggggcagcaagacatggtaaaaacatcattatacctagagtgagctcaccaagattccacactgctgattccaactgcgaatcctgcaatctcttagcctctctggaactcagttataaaagagtggtctccaaggtttcttccggctcaaacatcctgagctattctcatccaataataaacatttattgtgtacccatgataggccagccactgtcctggcaatggagatgtggggatgaaccatacagagagaagaaaccaaggtttgagagtgcagaaatgagagagaacagaaggaagaactgtcatgggaaaaaataatagaggggggaaatggaaacagtaactaaaatgtgcctggccattttaatggccaggatcattgcagccatcattaatctcaccatccagggaacctccaagtatttttgtcgacaccattcattcaacacttatcggtcagctgtcttaggaagtctctttgggggcatttttcttgtctctcaactagtttgaaagcacttagaggccaggtacttgtgtatggctgaatcaaaataccttttggtatcaagtataaaataaaccaggcaagtgctatggatctcctcaaaaggctagaggcctagcgaggagtcatattaatatttttggattgaatttagctcactggagaaggtaggaaggtagatagcagtgttaacttcaggcaggctaaccactcataatcaagcacaaactggaagtcatatgcaccccttgaggagtgcttaaattatagcaaagaaaaaggtcagtgaatggttatgatagaaaacagtagttttctttaatgagtccatggtacctgttcatcaccacagatccctgaaggcttaccttttagttaccttgccaggaggcattcaaaatagcattttttttttgttttttttttgtttgtttgtttttgtttttttattttttatttttttttggtaagcaaggaaggaaaatagtcaaaaggggaaggaaaggaaagaaagaaggtagcatgatgttctgtagatatagttcagcagtctcatagtctatctgtatttggtatttacattcatagtgcccctccttttgtgcatctccagaggccaggaagtcttttcgatatcctcatctctgacagtgcctatcatagagccgggcacaaagcagatgcctctatggacagaccgaattgacagatagatggaactggttcttcttccctgctccccgattccaagtgggaccaatgatgtgtggcagaatataggaaaaaggaggatctcgtcagtatcttgatatttcttgaggcctgcatactaaagacagaagaatcaatatgactcttctagtcaaaaccacctatttggcactcgagcactgagaataaaagacaaggtcagggttcctggttccaaggacttgggcaaatttataacctatttgattcacatagataataccatcagatacttaccttcatagattgtcaacagctactgcctgacccagaactgtgctaagagaagccatctctaaaattgattttttttattgacacttggtaatacagggtgctcttagaacatgagagggtagaggtggcgcttatctttgcatgtgacactcaaagctagatataagtggggctgcctaacttctagtcttcatgaaggtaggctctgtgggggcagacactatgtccttcttgttcattccttatctttgtgaactggggaaacgtctatagcctttttgtgccttagttttatcacccagaaagtaaggatactatgagtacctattcacaggagcgatgtgaaaataaattcagttaatgcttacttacaaagtccttaggacagtgcgtggcaaggagtaagccttcaatagtcattaaccattgcttactagtattttaggcttgaagagtgtctggcatgtaatagatatcaaaatatttttgctaaataaatgtatgaatgagttctacgtcagtagtattctacttttttttttttttttttttttttgagatggagtttcggtcttgtcaccaaggctggagtgcaatggcgcaatcttggctcactgcaagctctgcctcccaggttcaagcaattctcctgcctcagcctcctgagtagctggaattacaggtgcccaccaccatgcctgcctaatttttgtatttttagtagagatggggtttcaccatgttgaccaggctggttttgaactcctgacccctcaggttatctacccgcctgagcttcccaaagtgctgggattataggcgtgagccactgtgcccagccactactctacttttatgtttagcttgtacatcccttaaataatttttgaaaaagtatgtatttccttgtatatctttaagtagatatataaaatgttatatctcaagtctaaccagttgcaaaggatgcactttctagtatattgaatatgttaacattgtaaaataaaactctcacatcactcttttgaaatataacaaacggaacagaaatatcacttcacccattaaaaaaaaacatgaagaggttctttataacattttcaaatattacttcattctttttcctttttgcattggggtttccattctatcctatcacagaaattgattctaaagcaatatatttttagaattgaacatttttattgattttttgactccattactgtaggctcactaatgaaaaaaacaaaacaaaacaaaaaaaacctttttagccgctgagtatgatggctcacacctgtaatcaccagcactttgggaggctgaggcaggagtattacttgagctcaggagttcaagaccagcctgggcaatatggcaggaccctgtctctaaaataaataaaaaataaataaataattccttctatccatccatatcaaattggattgatatcattattaaaaataaagtggccatatgtgtttaagtgaattttaggactctggttctactgagctttttgtctacatttatgccgatgatacactgtctgatatggtttggatctgtattcccacctaaactcatgttcagttgtaatccccagtgttggaggcggagcctggtgggaggtgattggatcatgggagtggatccttcatgaatgggtttagcaccccccctttggtgctgttctcatgacagagttcacatgagatctgattgtttaaaagtgtgagcacctgcccctcttcctcctgctctggccatgtaagatgtgcctgcttccccttcaccttgagacataactgtaagtttcctgaggcccccctagaagcagatgccactatgcttctagagtttgtggaaccatgagcccattaaacctcttctctttataagttactcagtctcaggtatttctttagagcagtgtaagaatggactaatatgctgtcttaattattatagcttttcactaagttatgaaatctgatggagtgaatcttccaacctaatttttcttcaacataatcttgactccttttttcttatatttccatatcaatttagaatcagactgttaatttgtaccagaaacacaagctattgtgattttgattggaattatatttaatctgtcagtaaatttggggataactaacatcttaatgaaattgaattttcttatcttttaccatcatatagttatccatttatttacatctttaattccttttagcaaagttttgtagtttctaatgtagtggtcttaaacacctctcattaaatttattcctaattttcttattgttttgaagggattggaagaggtagtgaaacaaaatatttaaactgatacttaattttttctggtgaaccataagtttatatatgctgaaaagttcattgtgcattgagctatttctatgataagtaacacacaactgatcaaaactattaaccattttgatggataattatgacacaccgtatattttttgaaaatacatagtatagagagatggaggtagctattagggtacttggattaaaataattgtctaattatcccttttggtagtacttaagggttttttacacatccgagcagtatactttagtaagatatagaataggtgagaattgtgccttattttgtaaaatgggagagtggtaagagtgaaagtggaaaaggagaatttcaaccacaggagcatcttagactaattttaggtcataatactaacagagtttgaggatctagcaattgttttattaaaactgtcctgatagggtactctatgattagtccctgcatatgcttagggagtacatgtaagtggccctgcttacaaaccacttctctagaacagaagtacaagtgaatcagaagggtgacgtttgcaaatgttttatttttttaatgaagttaaagttaatctacaatgatagcattttgacttacttgctttctgataagatttctcatgtcatggagatctatgcagaacctggagtttgtcgctctaaaccactaacttgaatatgctactgttaatgttctattgatacttgctattgattattattaatttgtgtttattattattaattattaaacgtattatagtgggttttttttaaatagatgattttccagaacctgatttttaccctgggaatggatggtatacacggatgtcatatgaacaaggtcctcacatttttttctcccagctggccttcattgcctccaacccctttattttgttctcccattaagagctgtgtaataccaatttttgtaggctacaaattggttttctagcagatggaacatcaacctgaagaggtaatggatctttattactcaaactaggtcaaatattcaggccttctcagtaaatcataagaattatctgagagtcctcatgaggaaatagaaatgcatttcttaatagtaatacgtggttaaaaattaaacaacaaccataactttacttgttcctcacttgggccacaccattatattagtttttttactcagcgtgggtgcaaaatggattgtagctcactgggttctgaatatataacaacaaaaactgtcattcttgtttcataaagtgaaggtaatcctaaggagtatggttaaagtaaatgttcacaaactacatgtagtttcttgaatggcttattcttatttctaagacaacacatcagtagtttgacttccatttgggtgacacatagtaccagttcccaaaaaaaggacattttaaaaatcatgacatgacacggtcacaactagaaaaatacagcaggattagtagctgtgatgaatagggaggtgcaagggatggattctggaggccaggcctgaactccatctgttgtttattatgtgtgtcacctgttggggaaatataatttagaacaaaatctcctccttccccccaaaacctctccatgaaggtggaagagaaagaaaatggtttcattgttgtataagtactaaacaagaatatgatgtgcatcatagaccgcctactaagagattgcaaagacaaaaagaaatcacacctttttaaaaagccaaatagatgcaacccatcccatacatgttcttaagataaactataactagtcctctagtaagaggacttgacagcaccatttgtcacacacagttcaacctgaattcacttggtaattagggtgaccatctgttttagctaattgactttgtctcaaagaaaaacaaactcttatctttatgacatgaggcagttttgcaatttggagaaaggaacctaaatgaagttaggttcctacccctgccacagaactggttgataaggatgctttcttccttgataacatttcaaagagatagttcccaggtccttgagaaagacactcctccattataaggctggcaagaggcttatttaactttgaaaaagatttacatacatttcaaagagactgaaaaataatttacaagttttctaaagcaagaaaaaggatgagggagaggtctcttctctattttcaacagagagaattatttactttttcttttttgatttgtgcttacccttacacatcttaggaagccactcaatcttcttgaatcttttttctcatctgtgaaaggggagtaataacactcttaattatttcacatcacacagggcctaagaaaagtaactgtgcaaaactcacttgtcattttagatgctgaaattactagaaatgagatatctttactggttaatacatgaatctaatatttaagtggaaacttaacgtttttaaaagagtctctctctacaaggccaagaatctttttgcaacaaaaatgtgtcagctctacatttatcggttggagttgaacatttactctctctgcacgtcttacccataagaaccagttttctgtaaatgttgtgtatgaattctcttgttatcaatgtgttcttgttccatagtagtattaacaataaatgttaggaactgggcgtggtggtgcatgcctgtaatcccagctacttgggaggctgagccaggaggattgcttcagtccaggagtttgaggcttaggtttgctatatatcaggcctgtgaattaccactgcaccatggcattctagcctgggcaacatagcaagacatcgtctcaaaaaaaaaaaaaaaaaagtcacagtaaattcaagctgttctaacttattaactaattcatctagatatatttttcagaaattgtatttttataaagacatgtcctaaataattattttggtttaaaaaatcctgcaagatacattttaatacaaaaataaatataagtacaagaaatgaatttagatatggtggaaaacaagcacagaaatattttttcttcagaaatgatttttaaaaacatgaagaaaaaaaaatgatgccattgcttgaattcagaggtacttcgatttgacagatttgacatatcatgagataaagtacaagcaaagcaaaaataactaaaaatagctccatggtaatgctaagtataagaattaaattgaagattgaaagactcaaaaatctcaagcatgctacatgattttaccagctctctcaaataaagccgggctcagtaaatgctctggtgactgaaacaatgctaagattgggctttgttcttcagacatggaattcatcaccttcgtggtgatgaatcattggtgaggccctaattattaaacaagatgtcgaatcaaagctatcctcctctatttgcgtgaggatttctgtacttagaattgagtcctgccacattcttataatggtgcgtgcatatgggtagcaggtatacacaccaataaataatgtggctagtatgattctggaaattacaatgccagttagaaattattcagaatggaataaaatatttaaaacccctgctataaatcttagccaggaaataaattttcatgagaccagtgattaacccaatagcaaaacggaatttatatcaaccattcattaatcccatttcccttctcccaataccattaattaagtgtctgttcaattcccattcctgtgctacacttgtgtcgcttacccaattacagctaattttcttgcatgcaacgggagtggtaatagcctctaacagttgttgaaatgtggttcctagcgtttactgcagtgtgtcatccttaaatattctctaacatgttttctaattctgtttctaaaatcgagtttgtgtggggaggactgagttgaatacagtaagtgggtggtttccttcctttcaggtcctcggagacccttatctgatttaagttttgcctcaggagaaagctgtaccactgagattgctaaaaataactgttctcctgtcttgctgttttgcctatgattctcttggagaaaaaagctttggaaaataaacttttgaaggcgtgtttttataaattatctgatcacttcttcagagttcaatagaaagggtcaattttaaaattaaagcctctgtaacaagatgttcttttctcttttctcctttccctttttaaaacacagtttacaaaaaaggagatggtgaagcctgaaaatattaaatataaactctttgccttattttagtcgttcctaaaattatgggtgtaatttcagtttgtgtattctaaaagtaagtttcccatggatgtctgtattataatttgagagaaagtaattttttttttttttttttttctgatggttcctcacttgtcagtggctcctaatgatttacttgatttaagtactttgtatcttccctctgacactcctcatacttttctttcctcaccccaggtaattgatgatctgtaaataaacacttcaactcattagagaagctcactgtttaaaataagcctgcagagaatccttttgttaaggaaataagccttttataatcacctctgtgtcttctgcacagatttttagtctatcagcttttccttaaagcagaaagtgttttatcttttctaagcaagggaaagattcccttgatatgtagctgggctctagaggggagaacagggaagaaactcgggtttatgattagtgatggggttaaatgcgatagtaacagctcgatttagtggcattggctaaagcgtgctcctacacactgtaatccagtcatctgtggggtttggccttcatgtaacatcacttctttctttttatctacatacctgcatacctggccttgtgcctcttcccattcccctgtaattggaaatggcatctatttggggttgttgtcaccacctttaccgtatctattcaaaacttaatctacatacatcaaatcgttcaaagaaaacctgtgcaattccaatcaactctaatatccagttgtttctaacatgaaattcaagggactacttcaaagccacttggagagtagctttcttcccatcaaagaatgagtagtaggcacccactgttcactgttgacatgctgacagtgcagccctgcataaacacaaccgcttgccctctcacagcttatattttaaaggttgtaaaatcttgtttttgtcatatctggcaatagtattttgtaaattattttttacatgattttttaaaaatgtactcatcaaaatgagctggcacatataagctcattatatttttacattttagcaaaaacactgtcttttgcctacaacatgatagtttgtgttttttggaaaaaaaaaaaaaacaacaacaactctattatggtcttcatagtgtttctaatttctaaaatcattttggcctgtagacacttttaaaaaaaagatgctctctaaatatgaggaacataagattgtgtaactgttttcataagtgaaaaacttacacttaccattgtcatctgagaggaaataatggtttaattagtttttagataaaaagatttttgcaatcagactgtgtttgtaatggcatttataaaacaatttccccctacagtagcattgtaattaagactttcaatgaatcagaggagaagagtgcatttttccccctgtggtcggctgttatgcttgcccctcggggcctgctgctctcctgcatcaggcttgcactaatgcccactaatgccctgtaattgtgtttcacttcctctaattaaactgacagggaactcgaattgctgtcacttaccttaatgatagggaaggtaatgggattagaatgtggcaattctcacacagaacacttaacatcccaaataccagtttaccaggaagaatgcatttcagggaagacctaaggacttctggggttctggtcccacctcttgggcaatacaatatgtgagttagaaaggtcacaaagaatatcttcttcatgggcgtgctcctctgaacatcagctcctgaagattttaatggatattacaagagaaaaacatttctgaggcccagtagaagttggaaaagcagggttaatcaagttaaacagatttcttttatttgtcactgtcagtgccttgatacttgcattgatttcttttcttaaaggtgcactgtggtggcagtggcggcgtgtgtgtatgcatgcatttgtttgtataaagtagttcacagacgcatttgcatatttgataacttttttaggggcaaattcaaggcctggtgtcctacagatcatcttttgagatctgcagatctagccgatgaaggctgtcacatggttatttagtgataggctctccaaccttgtggtggtggccatgcatccaccagatattggatcagccttcctaaaatacctcttcaactccctttcattgcctctcccttcttcctccgctgctgttgttgcagtgtgtcaaatccctcaggcatatcgctgtgaaccccgaatatctgagacaggtctcagttactttagaaagtttcttttgccaaggttgcggatgcacagctgtgacacagccttaggaggtcctgatgacatgtgcccaaggtggtcgaggcacaacttaattttatacattttagggagacatgagacatcaatcaatatatgacagatgtacattgattccattggttccatccagaaaagcgggacaactggaagcagggagggggcttccaggtcacaggtaggtgagagacaaatggttgcatttttttttttttttgagtttctgattagtctttcaaaaggaggcaatcagatacacatgtatctcaaagagcagggggatgactttgaatagaatgggaggcaggtttgctctaagcagttcccggcttgacttttccctttagggtagtgggaccccaagatttattttactttcacattgcgtagaaaaacggaaaacaaaatacttcattatcacactgtttttcccttctattctgggtgctgctgaactagagtatacaatgcggtgttgtggagagtgcacagattcacccaggtttgagacctccgactgactagtcttgtaaccacaggcaaatttcttaaggcctctgaagctccatttatgcgttgataaaaagaagctttagggtttggggttattgtggaggtgggagaaaacgaatataagtctcctggcctgtagcagacattcatttaatgataactgttattattatcttaagattttaaaacttttatttgttttattttttattttattttattttattttgccagcagctaccctatgaccaatatctagatgcaaattgaaaagttggttgagcattcagctctttataaatagctttatgcttggtaaaaaccagcattatgattaacttttttttataacttttatatcctgcttgtaatggtgtgaaaaaaatgtttaaagatgttgaaataatgcagtttttaaaaaaagaggtaagtattcaatatcagctctactaactagtagggattacattctcttctttcctttggttgttttttattttgttggtttgtttttatcattcagctgagtaggatatcagaaatagtaagcatctgctccattgagattcgtagcaacttgttaatttcaggtgggattgtgtttagatgtgacttttggcagttgagttccaagatgtttatcagtttgctcagactgttatcatcataatttagaaatccacgttaccaaataaatgcatgcaaaaaatgacttctgaaagcttgacacattcatagaaagatattcctgtggtagagatcacacaatatcaatttagaatttgattgaacctcagaggccatatcaatgtcatacactgttttggcatatatttacatttaagctctgaatttctcccctctcctgtctatgtaatctttaccatttttagactttcagcatctgcaaagagagattataaaatactacccaagttatgggttgcactgaggattaaaatgaaataaggcattgaaaagtatttcatagactgggaaatgttgtctacattttagctagttagattttaaattattagtagtaatagggtgcatgtagaggacagaaattgtctcacgctgtaaagctaattcccatcatataatctcctttctataaatttttacgtgcatgtgctaaatttggagaattgaatgcactatacacagatgccattttttttttaaccatttttgcttcagtttagaaagcaggccaatgtgggtacaaaaagtaagccttaacacaaaggcctgtgaaaagtatccaattagcctgattgatctattttgtgcacagatttattcttaaggcacttacatgatacagatgttctgggagatgtcaaattttccttttgtgacagcaaactccaaatttaggggcatattctaaatatctctaactgtttttagcagcctgttttcaatggctgataggtttgccatttttagcaaaaaaaaaaagaaaagaaaagaaaagaaaatgaaaaacagtatgtgtatatatatatgtgtgtgtgtatatatgtgtgtgtgtgtgtgtgtgtatatatatatatatatttggcacgctaggctagtgggtaggaatgagaaatgatggtaggagaactggtgaagtttggaactgtcaggtcagctgggtgactgtgctccaggatattgtagtatacttttcttgaaccctatgtctaaagctatagggttagtcagctcagagcaatactttgaagaacaggttcataaagtttattttcactatatagagcattttgtttgtcctacaacccccttcctcaagcttccaaagaggagtgagaggtgcctgggcagataatcccaccatcttattcttatctttttatacctatgcaagttatagtgaactaggattttaaacgttttaggttattttgccacaaaggatatatttctcccccaccattttcatatatctaaacgtttagaaaggacacttaaaaataaggcagggacttcttaaagggataaatttctctgtatcttagaaagttggggaatatacatattctttgacctagtaatctacttctaggaacctgttctacgcaagtgctcacccaagcatgcaagaatgtacatatacagatgcccactgccttattctttgtaaaagtgaaatattgaaattgtggtaggcagaaaaatggctctcaaaggatatccacgtactaagtcctggaacccatgaatatgttatggctctcaaaggatatccacgtactaagtcctggaacccatgaatatgttaccttatatggaaaaggaatttcacagatgtgattaaggttaaagaccctgagatggggagagtgtcttggattatcaggtggatccagtttaatcatttgagtcttcaaaggtagaaaatctttcctggctagagtcagagagagacggaactacagaagcacagccagagagatgctaaattgctagctttgaagatgaagagaggaatgagccaagaaagtgggctgtttccagaagcaggaaaaggcacggaaacagattctcttctagcacctccagaaaggagtgtatgcctgaccacaccttgatttcaatgctataggatttctgacctacagaacttaagacaatatatttgtgctatcttaagccactaagtctggtaatttgttatgacagcagtagaaaactaatttggcaacacagatgctaaaatatagggaaacacttaaacgatagctcactccaagtagcaagtatcatgaattcacaacaaaaggttgaggcatttatattgtactgccatgaaacatggaagagtgttggtgaactcttgctgagtgaaagaggtaggagaactcagtgcagccattgtatcctatttcagcgaaaaaatattgtatatgaacatatttgagtggtgtgtgtgtgtgtgtatgtgtttgtgtgcgtgtgtgaatggaaaaagatctatagctacctagtgaaatattaccaacaatttcagggcaggaagggctgtgtgtttgtggaaaggggggaattcaccttttactttattcatataaatattgttcaaaatgtttaatatagactattgtgtaactttaaataccattttttaaatatggaggaaaaatatagccataataaggccaagtcaatgctgattcattgacaactagccagaagactttggtgtgtcaccttgaccaaggatgacttaactatcgaggagaaaaaaacttaaaaattatctagttctaacaccttgctttagagataagaaagctgggatctaatacagttcagtgactttcctgtcctcacagaaagacaaagaagaaaatggcaaataagataaagatattctggcttttcactataccacacagccacttacttgtgtttgttactgaaaggttaaagaaatatcttttcttactcatcactaggttcatggctgaggcccctgtaacaaaaggcagattagtaacagaaaagcatacaagtgtatttagtatgttttacatgacacaagaggcttcataaagaaatgaagacccaatgaaataagtaaatctacatattttttaatgctaggtttgatgatgacataaatagttgtagagaagtatgattgagcaaaaacgatatgatctaatggtaagaaacgggaggaaacagcatggcctgattttcactttcttttctgtatccctatatcttcagagttaagaatgttctttcccttcagggttaggaagggtacttctcaaatgagggtcatatgactggcttgaggggagaaattcaagaagaaggtgagagtgacctttctgcttctgcagatttctcaaatgccaagatgccatatattgaggtagcatgtcctgaactccatcattacacagcaaaagccatatggctgtcacatgataggcactcagatgaattgtccaaaatgtggccaattctgattttaacatttacccatagcagtcattatcagcaaatatgtatcagatgtcaactaaatatgaggtagtgaagtgttaacaatataaagataatgatgatatagtagtattatgaatagcatagacaaagaaacctgcaattttaggatgacaggaaccatggtagaaagatgcatgaagtgcagtgcatacacacacacacacacacacaaaggaacaaataatgtttgaggaaatcagggattttttttttttttttacagagaagataatatttgaatgagatcatcaataaacaggtgaagagagaatggggagcattgtagattctaacacagtggtcaatgttattgaataaaatgatggagggaatgtcagcagtgagaatgccacgtgaaagagcctagaggcatgaaagcacagtctatttgagcaatggaggtggaaggtaaggttggagagcaaacctgaagtcaaattgcccaggaccttcttggacttatcttgtagatgataggttggcattggagaatttcaggcaggtgagtgaagtaatgtatgcttattagaggtaatgattaaataatggacttgattttcacagagtgaaactggtgacatgaaatgacgtaaaatagctggcctaataatttttcagctccagacttaattgaactaataataaggtggtcataaaacttgtcgtccgaattgaagcactttatagagtgaaaggaggcattattatcaactatgcaaggacaatataagaaattttgaaggaatcatctccctccctatgaaacaaattcatgcaggtgtgagatgattggatttatggatgataattagctggcaggttgatatttgaggactctcaaacataaggccaatccatggactctcatgactataggatggatgctgtggaaccccagaacctctccactataacctttactcattgccttaaaccagtctcaaatttacattatttcaataatatatttatttagggccacaaatccccatgcaagctccatttttagagaagttttttttttttttttaagctgttggctactttagccctcatgtagcaaaggttgctctttcttaaaatttctctgtccttcctaaagaattaattggacttgagtgtagaacctggatttgatcctgggtttatctctcactctttggcccttgaacatgttcattggtgtctttgagcatacctgtaaaatgtttatcatatgagtatgtcataagaattaaataaacaatcaaggtcaagtgtttgacacacagtagacacccaaaaaatagacattgtcttcatttcatatctcttcattgggaaaacagctttttttttttttttattgagccacgttacttctcagtcaatttgcattgtatctgtatcatagcatttgtcttactctattttaattactttaaaaattatgtctcatttgttaagccagttgttcccaagtgggaaaattttgctccccccttccccaggatacttagcaatgtctggagatattttagattgccataactgggggaaaaatacactggaatctaattagcagagaccagggatgctgttaaatattctacaatgcctagggtagccctccacaacaaagaattatccagctcagaatgtcaatagtgctgacatttagactacaagctttagacggtaactccatgcagattgtgaccatgattgtgttgccatggcccagtgcctagccctgtgatcattctaggagtctcagtgttaattagtggagtggaagaatcaggacctgatcattctatgagtctcagtgttaattagtggagtgaacaaatcaggacctgatcattctatgagtctcagtgttaattagtggagtgaatgaatcaggaccaatggtttagccatgatccagctttgcatgtatttcttcactccctttagtcaacatgtaggttgttttcatggtatctcaagcacacagctacccactgcttgcttggagtactaggaatagtaaacctgaactctgaaagggacatcattaaagaaatattgcccataaggggataggtatcatatagttacctaaaatacttcaagtttcttaatcaaaagcacctgcaagctttcacatagcatatagaagttctattttttacctgaattaaaccgtgagagagcatgagattaaatttgtctctggatgcttactgaaatgagaaatatttgaggaccaataaggaaggtggctttactttgctttatttatttatttacttacttacttattattgaattattttgcatcctatagctgccaatttctaataagagatgtaagactctagaaggagcttgagaaagcctgaggaaaccagcctggcattcagaccaagaaacctgctcctgggcttgggaaatttctaattgttggatgagatgctgctcttttgttattcagacaaactgattgacgtgagtcttgtgctgtgaaatactgaagagctttccgagaattcacacaagagatttctggagcctgtcacatcctccctacctgtcctcatctcagctctctagaactccttgtagcctaatcagtaatgtcatcaaacctcaacaaaccattactctggtatttcctgttacaccatatcttagtttgctagggctaccataacaaaataccaaagactgggaaactttaaaaaaaaaaaagatttcaactcttatttttgattcagggcaacaggtacaggtttgttatattgatggactgtatgatgctgaagttcgaggtgcaggtcccatcatccaggtagtaaacatagtaatcaacaggtagtttttcagtcctccctggcttcctctctttccaccctggtagttcctagtatctattgtttccatctttctgtaccaatgtttaactctcacttataagtgaaaacatgtggtttttggtatctgtttctgtgttaatttgcttacgataatggctgccagctgcatccatgttgctgaaggaacatgattttgttcttgttatggctgtgcagtattccatggtgtatatgtaacacatcttctttaaccaatttaccgttcatgggtacctagcttgattccatgtctttgctgttgtgaataagatggagacttattcacagaaaacaacagaaatttgttttctcacagttctggagactagaagtctgagatgaaggagtcaacagggttggtttcttctgaggcctctgaccttgacttggagatggtgatcttctccttcggccctcacactgtctttcctctgcgtgcgtgcgtgcgtgtgtgtgtgtgtgtgtgtgtgtgtgtgtgtgtcctaatctcttctttaaggataccagtcatattggattagggctgagatcgttaggactaatgatctcattttaacttaattacctctttaaaggtcgtatcgcccaaatatagtcacattctgaggtcttagggtttagcactccacaatgtgaatttgaggatgggggagacacagttcagcccacatcacacctctacaggactcaacattacataggtgcccaataaacacttacttagtggaatgatatatcgtttgaaatggagtgtggtggcaggctccttcagcccagatgatgtgatttgcagcctgcagattcttccccaccccaggcgagcacagatggaagcctactccttctacccctggagtcactgtgcttaagaaaacaaaattatgatactcagactgtatttaatgtttattaggttggaagttctttctttgttttccatttaacaggctttggttaatcacaggagaacggacacaagggagaagagagggttgggatagcctcgggaaaggcacaggaggtcctctggagggaaaagggcctccccaggaggtagggatttctatggagctctcaggatgaggaagagagggggaagggaggtatacagtttggttcttataaacctggctttgtgtttgtttacatgtaggttgtggggataggggtggattgccaggaaactttgagcttggcaccagtctggcttctgtacaggtaatgaaaagacttgaacccataacatggtgacccaccctcaagtcagacttatagctggttttactcaggactttttactaccttttgattcctggtttctggcttcttttttttttttttttttttgagatggagtctcactctgttgcccaggctggagtgcagtggcgtgatctcagctcactgcaagctccgcctcccaggttcatgccattctcctgcctcagcctcccaagtagctgggactacaggcgcccgccacaatgcccagctaatttttgtatttttagtagaaacagggttttactgtgttagccaggatggtctcgatctcctgacctcatgattcacccgcctcggcctcccaaagtgctgggattacaggcatgagccaccatgcctggccttcaagtcagacttatagctggttttactcaggactttttactcacttttgattcctggtttctggcttccctttctgacttcctctaagtacctcctattttggtagtagaaatgggatctctggccagttttattcccttggtagttcctgctttggatccaccacagcacacagaagctccaggataaggtctgaaggtctgagtcactctttgccttaaactataaaaatgaatcttttttttgcccctcccacatctctaccattatttgattttttttcccctcagttttttgtttagagtcatacatatgtctaattcctaaatcctaaattcctaatgaactgatttcctatgggaccagagtttgttttatttaactctttaagttttcttctcccacccttcacacagaggtttccatcttgcctttctattctatctgtttagggaacagctgtctattttctagaatgacaaccattttaggtcacaccttcattaagaaacttttgccagctactggacttagtagacatgccagcaaactagagagatgaagttcctaattgaggtttataggctaatggtagaaacaggaaaaaaaaaaaaaaacggtaagtaaattgtctatgtaacatccttcttagttttattagtgttttagcagggaacttctggagtcattacaaatgagttacaataaagaattgtacattaaagaatgatagatagatctctagactttgcatcatggtggagaggacatttagaaaagaatgtttttcttgctgttcagacccagctctggaggctgctaccttctgaggtgtgtataagtgattagcaattcccttcgaggactccccatcagtgtggggcagacatggaaagcctgctgcatctggctttctaatttctgcaaggccatcccttccttgatatgccaagtgagggtgactgaaatagaatccactcttgatgcttgggggatctccctctttctggcagttacaggtgctcagtttgattacaatcatcagtgaggtgtgttcattactgatttcattacccatgcagaggactgaaaaggaggaatcagtccccagcatttgctccccatctttccccagtagaagctaccacggttgtcagagcttgaattcctcatgactggactatagaagtgaaatatcagggtcaatgtctggttctcctttttcatttgcctcatatatgagtatgtcatgaatggattttaacttggtgaaaatttcacaagtgttaaatattactcagatgctcaaagatttccaaatggcaagtcttggtaaatccagatccagcctataaaacaatttattctccctagacattcaatccatctgtcttccatttatccatagttcagattcttggcactgtgcctttccttaggaagcttactatcacaagaggaaaagatcagggtaaggaatttgcttattggataccattttcatgctagactcagagatagacatgttgtatgcattttcttatttttaccataatcttgggttaggcattattttcactattctgcagatgagaactgagattcagtgagtttaggaaaattgcccagcctcacacagctgagcagctgagatgtaatgtaagtctgtgtctacttcgaaagctcttggaaggaaaggaaggcatgtgggagagcatgaaggttgaggaggtaggaagactggaaattgcatttgcattgtgattttacataagaaggtaaaatgagataacattgatttatttatcaaagcatccgtctttccccaccctaagtcttagtgtcataagccttctaggagactaagatgaaccttggagctagcactatggctttccatggcgacacatggccggataggtagctctggatgcaaataagcaggttggtatgagattctggaagaactaagattttggaatttatcttcctcggtcatctatggtcccatctctcatctgtggccagaggaaacttggccttaacattctttgactcccaagtctaatgtcactacaagactttattgagtacaagggaaactccttttgggggcattgtgcctgacactgggagatgtggtctctccctgacatagtttaaactctatctactgggagagtacctgcttacaaatagcagagaagggggccaggcgcaggtggctcaagcctgtaatcccagcactttggtaggccgaggtgggcgaatcacgaggtcaggagtttgagaccagcctgcccaacatggtgaaaccccgtctctgcactaaacatgcaaaaaattagccgggcatggtggcgcgcctttaatcccagctacttgggaggctgaggcaggagaatcacttgaacgcaggagacggagcttgcagtgagcagagattgcgccattgtactccagcctgggcaacaagagcaaaactctgtctcaaaaaataaataaataaataaataaataaataaataaataaataaataaataacagagaagacataatgtcacatgaacttgcagtatacacacacacacacacacacacacacattcattcatatgcacacattcaaatgcaaggcatgatcacaacatttttattttactctgctgtgttgtatatatgattaacaaatgcatcatcagcagtttaggagttattgtcaacctactccaatagtttcctataatcagtgttaaaaatccagttttccatagggccgatgacataattagaagcaacaatagttcattcccctcagcttattctgagtgaacagagaagcttcaagcacccacctttagccctactcttgcctttttcatcagggcttggaagacagggagtagctacagccaggtatctgactatgagggatgcggggtgagaccacttggtgccagctttccccaagaaggctattcagggctttctttgtctgcccgacatcagaaagcactgatctgtcgtggtatcgggaagagagttctgtgtaggctctggggtcagggagaggcagggttttatcttggctgtagaggatgcttcaggatggggaagagggcagaagtgggatttaggagattattatggggtgctcagagaaactcttcttcttgagggctggggcataattacaagggaacggaaaggttgggatcatagaaagaggaacttgggagtgaattttcttaaaatattaggaaatcagcatagtgtagacaggtttacaagcagaagctctgaaatattgcctgtatcaggatcctggttttttgttttacttttgtaaacttgcaaaagtttcttaagctctttatgccttagtaagatcagcagtcacttttatctctttgtccatcgtctcagctaaccttatttgatgtctacaggtggatatgacaataacagtcaaagaatttgggaagctggtatagctttttctttctttgtgcagggactttttttgaaatgttgttacagggtatgcctagcctgtattgttttagtgtgtcagaaagtgtggcttttctcttctaattaagtggtttgattatgaatctcttgggtttttttagatatagtgactaattcactgggaattaagcagaattgccataattgtggattttggttctatttcaggtgtacttccagtaaatggttacaaaaataagttcccaaattaggttaaacaatggaattttgaaggaaatatgaaaatacagattcctaggccacaattggagagattgattaatcaaatgatttgttggtttgaaacccattgaactatcctcctgtttcaagaatttatctataatttaaaaatgtttattaaaatggaaaatttccatgccctaccctagagatactgaaacagagtattttgggaaagggaccaggaatcttcatttgttataactatctcctattaacagttttaagcctatggactattgagtctaagactctcctatttattttctcattttttagccaccatttaccactatttaaccagcagcagcaccctgaggacctaagttacgtaaaagttttcattagcagccattcatcaatgtcttgcactgttcgagatgtacttttttttttttttttttttttttttgagacggagtctcactctgtcgcccaggctggagtgcagtggcacgatctcggctcactgcaagctccgcctcccgggttcacgccattctcctgcctcagcctcctgagtagctgggattacaggtgcctgccaccatgcccggctaattttttgtatttttggtagagacggggtttcaccgtgttagccaggataatctcgatctcctgactttgtgatcctcccaccttggcctcccaaagtgctgggattacaggcgtgagccaccgcacctggccagagatgtacttttgggaagagatgttgctcttctgaatttctaagcagacagggaggaacaactgagaaactctcagcctcccgcaagggctctgaggaggccttggaggtcaggagccagcaatggagaattaagtctctcccaagaagttctcccagttttggctgttcagcctttttcacttatagccgaagactttgtgttgtcataagaatccagtgaagtgtgagatatatgcgcaatctgaaaaggtataagcttgtaggatgataacctaggcaaaggtcttattgtgtgtattttttgtttttgtgttttccttccctacagctggcctgcagagattacaatgcacttcttaaaattccatgcagacctagcaaactttcatttagatgccagcataggaaggaagatctcagtgtatgactggatgtaatatgcattctcaagtctcccccttcatagacacagtgtacgctacagagagcaaagtgtaattttaagaaccttgtaattctttacaaattaacacagcagatggtgtttatgggagccacagagtgaggaatatttgggacgatgtgagacatgtgttccagggtttcggcctgctttctacatagtttagtttttaactgtcatgctacaaaaattccattttgcctcataaagttttcattggttccaagtgtgagggaatgccccaagagatagtactagtatgacagactccaagcatgctcagtgaggtccctgattcacctaagcctgaggagtgccagtggcttgcaccttcgtgttcaggaggtggtagtctcctgggtgttggtgctggggttgggggcagcctggccttcccccagcttggagatcagtttgagaagtcgaggaagagcacagagcttgataagcttcacccaaagcaagcaaaagacagcataagtgggctaacaataaggttagcacctctagattggggcttgttagtgtgcaaatagttaaaatatttctttggttgttttaactgttcatataattaaaaagaagaccttatttctgtgctagttccctcataatgttaagaattaaagtgcttgggacctgtgtgcttgctttgaagacagtgctggcattttggagggggacatgagagggagaaaacaacgagatagagattgaaagatggtgctgccagagaggacaggaagaggtcattctcacaggctttggcaaagacaaagagaggtcagagttgatttgggcaggcaaaacagccctggctctggcactagagtggagatacctttgggatcccctaggatgcaaagagtccttggtgctcccaaaccttgtacttcttctgcccactggcacccacatactttcctcactttcctttgctgcggggctggcaatgggaaaggtcctaggtgttctcaaacacatcctgcctccttgttccattaagggttctcatctcttagaagcaccattttatcgaatctattctctttcagttcctactgttttcaagcttatctactcccaccactcactactttgataaaagccatttactctttgtacttcttcttccaagggtatatacatcttaatcctatgcatacaatcaaaagctttggctcctagaaatttccatctttttcccgcataggggaggtatttgagcagggaagaaagggaatgagtgtataaagtgtaaaaagggaatgagagtaggcaacaatatgactctaccgttggtgaagtcgcagcgagccaccaattccacctctgcacctagccttgtctccaaagatcggtatcatgtaattaagccaagtagctagaatactatttcattcatagccaatacatatttatatgtacatatctatacatatttctaatttgcttagcaccgattctgtgtaaggcactgtgccagaaacttcagtttcaaggaaatgtaatggtctgacactttcctatccttgggcagctgtgcctttaattggataaaaaaaaaaaaatgctcatgacaagtttctgaacactacaggatagtaatgatgcagcttatattatttgtataccgtctgacatcggaaattcaattaacaatgcaagaggtttgcacaatatagaattatttccttggtgagaattgttcataaagaaccaaataaatggtagagatggctataggcacacagaagaggctgggtttctgtgaactgggagggcagggaaggggtgatggaggaattacaacatgagctggctcttgatagaatggtaaatgaggcacagggaggtcaagactgtggatccccacatagacatactttccataaattaaggttaccctctgcctgaatgttttctgatttctgtgaattctcagcaatgtggacccagttattgacctctttttgagatggtagaaaaatgccagactctagggattctttaggtgttgaaagctttaacagtagctgagtggtttggggaatatgcacttaaaaatgaaatggaacttttaatttcattgaaatttaaattatttattcagtttgggtatgtgtgtgtgtatctgtgtataaaatcaatgggaatttgcacttttgccttaactacttttatctcaactgtaaagatgaaatggcattttttagcagtttgctcagttcatggtctcttgcaggcttagaaggggtatgtggttaattaaccccagcttttagcaatcacccaagctcagggggttggcactatgaaaaatgtcttttatgcagggttgcctggcaagtaatcactgaggactacacctgtgttgataaaataaatcaaggaacaagaattgtaaccttacacaggtgccaactacttcctatggctttgatcagcaaattgtgaagtgggtgaaatttatttttaggactccatattttccaaatcatctatccctttcatacctgctgcctatccccaggtgcctacttggaccatccatctttctatcaataaacaagcatttcctgaccatgtcttaagagtttcatcctgagttctttgggagaaaaccaggcacattctactcacaaaaagcttgggttgtattctgcagccgcacaaaaacttattaggtaacactaggtagcatactgtaaatatatgcatggtttggcacactacctacatgaaagatgtggtcagaggtgggagattttgagcttttctttgaagaatgggtacaacctggctaggtgaattgtgagttagaaggggaatggccccttccagtcaggcaccaatatgagcctataaagaaggaggacgtttgtgagttgttgagaaaatacaaatagattagaactggaccattatgaaggggagaccagattctgaagccctaacatacaggcccaagaaaaaaaaaaattaccattcaacctagcaatttcattacttgggtatatacccaaaggcatatgaatcattctaccataaagacacacgtactaatttgtttattgcagcactcttcacaatagcaaagacatggtctcaacctaaatgaccatcaacggtagaatggataaagaaaatgtgtcacatataccatgaaacactatgcagccacaaaaaagaacaagatcatgttctttgcagcaacatggatggagctggagaccattatccttaacaaactaatacaggaacagacaaccaaatatcacatgttctcccttacaaataggagctaaataacatgaacacatggacacaaagaggggaacaacagacgttgaggtctacttgagggtggagggtgggaggaaggagaggatccgaaaaaatatatatcaggtactatgcttagtgtctagtgacaaaataattcttctgtaggtgaacttatgtcacaaaatatctgcactgtttggcacactacctgcatgacggatttgatgtgacacataatgtgtgtgacacaaaatgtgtcacacaaaatccttgtgacatgagtttacctatataagaaacctgcatgtgtatccccgaacctcaaagttaaaagaaaaaaaaaaaagattcaaaaacaaaaaaaggaaataggagttcagtaaaatctaaacaagaattcaggaatactgagctgaggaaattaaagcttgttcttagcaggccttaatgaggatgatgagggaacgcagtcaacaaaggatgctgtggcattcgagatctccactgtggtgagtgggtgtcatggaaagagagatttgaggaacagtatgaatccttatagactttttgatgggtggtttctcaaggttagtaactaactggatttaggggagaaatacgatattaagatttagagctgggtcagtaatttgtgctggggaaaaccctgtgaatgaacctagatgccctgccaagacatgaactcctcagacagtgctccagaccttgcctgaggtctgccctgatacccaccactctgctttccagttactgcggcttagtattttaagatctctggtttaataagacccttttctttgtaagtgacagaaatgccacatgaataaacatggaggcatttattaactcatggcaccaggtaacccatggatagaaacttatggctttaagtgcaactagattcaggaggccaagtgtgtcattcattgacttagaaaaatttactgaaaacctgttgcattccaggtacaactccaggttctatataatgacaagcaaaacaattattttataggttaatgtgttttatatactaaatgcttgtgtcccctcaaaattcaaatgttgaaacctccaatgtgatggtatttggaggtggaggcctttgataagtgattatgtcatgaaagtggaggtctcctgaatgggattagtggaggcctttgataagtgattatgtcatgagggtggagatctcccgaatgggataagtgcccttataaaagagaccccagaggactcccttgcccccttggccatgtgaacacacaaaaagaagacagccttcttggaataagaagtggaccctcaccagacacagaggtctgccaatgctttaatctaggacttcccagcctccagaaatgtgagaaataaatttcctgttgtcataagccacccagtctatgatatttttgttatagcagctcaaatgaattattaataaaagaacacataatggaaaatatgaaccattttgatttgactccaaaagctgacttctcttttcttcccctccttcttcttcccttaaatttctttttctccaattcttcatccctttcttgccgcagtttctctcatcatctctccctcctgtctctctgtctttctccgtcttcctctgcctctccttctttcagctatgctcttctttttgtggggtctatttttggagactccccaagtagttcaaggtttatctagtaccagtttatcaatctcagtgggaaaatatgtctccttcctaataattctacctacaacctgtgattctactgctgattctcactggtttggatgttattatcagtttgttccctgcccacagagtcttggttgggagttacgagggctgctactgaaataacatggatgggttgatggggggatgagaacaggtgttgatctctctgagccagtcctgctttgcgcattgtccaaggcatatcctgatattgctctactatcggatagggcctggtagtctcaccaatattaccatattcttacattatatattgaggattatttctttgaaaatggatgcagcctggcagagaagaatcagagatacatcagtgtttcccttttcacctttacctccttcccttccccaccaccacctcagagaccaagaaagctaggttgtgatgtggtcagagtatgttgattatagatttgctttgtggccactgttcaactttcatccattctaaagagatactgcctgtttcttttccaagagaaatgtccttagctagtgaaaaggtatatttagaaaggtccacatgctccaactaagatttatacataatataaagatattatgaaatgttcaaggttctataaataatggtgctatttgtactaaggatatgatttctatatccagggtttcagggtaggtgggcaaccctccaaaaatgatagtgtgactgttggatcaatagataattttttcttctccctcctgttgtctaaattgtaggtttaaatgacagcaaaatgtgttggagatagagtgcatggcatattattgctttctggcattctgatgattttgacttccatttctttcaaatgacaacaatttgaaaactgggcatttgattagctcctaaaacatctaatatattacagtcacagctacatgatattttgaagattccttatacattcagtcatgtctgcaggtcccttcaagggaaagaaaggaagtgataaacatctaccttcttacaaccatgtcccacatattaatatagtaccctgaaacatggttgatgtgcagccatggatccaatggaagcaccaagatggtcgatttatattcccagggcttccatgagagaccccccagaactggattatgtgtttatggtaggatgaggggctgggatgggaacagcctttaaagaaatactcattttctgggaggccaaggtgggtggatcacgaggtcaggagatcaagaccatcttggctaacatggtgaaaccccgtctttattaaaaatacaaaaaaattagccgggcgtggtggcgggcacctgtagtcccagctactcgggaggctgaggcaggagaatggcatgaacccgggaggcggagcttgcagtgagccgagattgtgccactgcactccagcctgggcaatagagcaagactttgtctcaaaaaaaaaagaaatactcattttcagagatttataaattaataatttttattgctttttgttttataagttagggagtcagtatcagttgtgtattattcagcatgtttatataaatccattacaaacaccttcagaatttcagaaggggtgatgggtatttatatagggagacagtggggtggggatccttgtccaaagtgggccaaaggaggggcctttattttgcaaaggggcaaagagcagtgttattaaaaagaaattgttgaaataaaatattgttctttttctgaagattaattgtaaaaagagaaatttctgttaatggcttaatccttctatttaaggacaaacgaaatataaaggtcttcaaggtagtatctgatcctttagcaaactggacttgaatttaaagccagaggatgggagaataaaggatctcctattaaaaatccaagtcaggaaatttattccctttgctctcatgaattcaagccatggatcttccccaaatgcgttttgtaaaatagttctcaaagactaaaacaaataaagtttaataaacatgcatctccctagcacaacagatggcaactagggaaggtgcccacagcaatgtagagagtagtcccgcctggcttcgttttttaataacgatatttattaaatggctatgtctattgcacactcattctctgcaggtaaagataaagaagaaaagtggggagcaggctcaaaaaaggcatataagttctgcggacaaaaagcagcagaggaaatacacctcaaagtgagattttactggtagcctttgaagagaaacacatgaaactatgaaatcacagaatcctgaaattttagagaagggagatcgtttagatatggaatggaaaaagccctggctgggagtctggaggtgctggtcagatactaatgagccaggtgatcataatcagtcacttcatctctctagaccttgctgtccttatctttgaggggaatgaggaggtgggcaaagaaagacagctaacgttgactgagttaactctgctggttaggtattggctaaacacattacagggcctatgtctttttatgctccccaaaagcaagcacttagccacgttttagagaagagaaaaacttcaactgcctgtcaattcccagccctttctgcagtgttatgattgtttccctgtaacaggaaagtatagttacaggtgcttgatggtttttctgcttctcatatttcacgattccataattcatccttggccctttcattctacagatgataaggttggagtctagagatgtggccaggtcacttaggtggttattggcagagagtggttacaactaattggcttttgtttccttctgttcagcaaaaacagggaataattggatgactgacttaacaccacacattttgcttttattattaggtgatgatgtcaaaataaatacttacatctgctttcacttcagtttgttaaagtatgcttaatttgtagagcctggagggtcagggatggagagctaggtgaggcttctggttgactcctagggaactagaatgtgcttgtgatgatcaaatccttagttactagacaaaatatgtcccaggacctactgtgtaaaagactgaactggagattctgcccctcatttcacctcttagaaatatctcagactagttgtgtatttaaaatgaactgccccaaatattgcctttttaaagggagagaactttttctttagggataccagtttttggcaaggttttcgtacattatctgcctggatggagaaagcagaaggacaggtgatccaaaaatagtttctatgtagtttctaaatcaattctttcattttttttccacatcaaaaatactttcctaattaccctgaatagtctaaatgtcttttattgtttctagcacattgccattgtgattgatcgtcctgctaaccttgtgaagaagacagagcatatattatgctatccattgtgcttatgacaaaactcagacttttaaaaaaaaatggggtaaatggttagtcaaggatcatggaggctaataatagggagctgatactaggaggcaagtctccgctccttccttcctccctcctcactatcccccattgctctctccctttctcctctcctctttctccctctccgtctgtgtctctgtctctctatctctccctcttttcctctctctgtctcactctcagtagctggcttcctgtccagtttaaactgatgaatttaaaattatggccacatttagacatacagagctgaggaaagtaggacataatggcttccaagttcccatttgctgtgcaaagctgagcgttgacaagctactattgttattcctgcacaaataccttattttttaaaattggagctaagaaagggccagtaaattgactatcccatccagtggcccaaatttcctaaaccctagtccttgttttaacattccccagccttcatgtacagtcacaacaaatatggctccagagtcaacttcatttctgaattgttttcagccaaagactttgaggctggagaaacccaggatcacaaatattacacaaacagaatccggacaagagtaacatggaatgattaatgttaccagagattctctgggcttgcagatcaaaataaagttagtagtaatcacactataaagaagctcttatagaaataatttgtctctgtagctagtcaaactgatctcttcacatcatggagaaaaagctggctcatttcactcactgccttcccagaaccaccttgccttcttgtctacatgactttctttttgccagtcaaagtgcctctctctttcctattctaatcttacccagggcttaaggtccagctaattttctctttcctctgtgacttgacttcccaaaggcaacatcttctccctcttctgagcaactcagtcattgagcgtgctaatctttctgcacagtttttggtattgttctggtcttgtgttctggtctattcccctgtatcaggagctctttgatggtgagaattgtggctatcacttttcatgtgttccccacagggaccaataggacgcctcacatctaagggatgtgtgttttacagttgcaggatattgatgccagaagggatacagatcccacatgttgcccttctgctcacagaatggggcaaccaagcctcccaaacgtgtctgtagcaactgcagttacaatcttgaacatgactctttcccctgggggtaggattgtcagattcagcacataaaaatacaggatgcccagttaatgtgaattttaggtaaacaataatttttaaagaataaatatatccgcactgttttttaagtttaaaagtttaaaatgtcatctgatgctgcatttgcacaactcacctcattcaccctaccctaatcctagccctattggatcctgtctttatttaaatttttgatattttattttcaacatggatttatttgcgttagttttgattttaaaaatattacattaggtcgggcgtggtggctcatgcctgtaataccagcacttagggaggctgacgtgggtggatcacaaggtcaggagtttgagaccagcctggccaatatggtgaaatcctgtctctactaaaaatacaaaaaaattagctggacatggtggcacatgtctgtaatcccagctattcaggagactgaggcaggagaattgcttgaacctaggaggcagaggttgcagtgagctgagattgcgccactgtgctccagcctgggtgacagagcacgactgtctcagaaaaaaaaaaaaaaaaaagtatgtattacattaaaatattatttatcttgatgactgagttccttggtgccaccttaaattttgcatctaaattatactccctctctccctcttcactctgttcacaccagtcccaggcccatttgattctcattcttctcatctgaaaagtggttgtatagatatggcactggcaggatggaataagcccagagtctggcatttacattcactcagtaattattttgtgtatctaaagtgtctcaatttttttcttttcactttgaaaagtttagtaatcgatcctccatctgttgcagccaagttttcaactaaactcataacttttaatgtttgaaagtaagtttttttattctaataaatgaataggccacaggaaattatgattttcagaaggatcatggtccagagctccacataggtgccctgtattttgatggcagacaacctatttgcaaggagagaaccaaacagaaaaggaatagcctttggctgctgaatttgtggcagatctgaacttggagaggcagagcattgaagtcacactcactgcacaaccacattcccttgaaagacagagcagcacgttattcttctccatacacttttgttttcttggagctatttgtaggctgatatttcaaagttgtaaaatgttagccactgtattttaagctctttctacttaaaaaccttagtgtctacatctgaaagagtgagtgtgtgagtttagggagtgggaaaggatgatggggaatggtaggattttagaagactaaaaatatatgcacatatgccttggtttgggctttttaatgaaaaccctatagggctgtgcatcagacatttgttcagaaaaaatagttaattaagcaagtggcagagaagagtgactactttaaacccagctatggagagcgggtatgtatgtatcagctttatgcttcccggattttgtcacggaaagagaacatttagaaacctgttggatggtaatttttatgcattgccaaatcatgttatcccattaggcacaacttaagatctgggatctcattttatcatataagcaaattactacagggacctacatgattttatagagactgagtaggccacaataattgacttgccactagcaccataaataaatcaatctgtagcgtttgactaaaatttagataatttaatcaatttgacaaggtttttgaaaacatttatcttttaaggggaagattattgtcatccataaagtttatagagcttttcatccatgggaatcttgttgctcttttaaaaagacaatggggattcttttctgttgagttttaattgtttttctgtacccaccaaaaaaaggagaaaaagcaaagaaataggaaactagtgaaacttccaagtgaacaatttattaaagaacacttttttttttctctacctctgcctgttgtagtcataagggaaattttcctcatgacctcaagctgtgggttgcttattatcatttttagcattccactacatgacagagcagagattagcaatactgtattttctagtaaagcatctcttttgaatttgatatagaagttgcaatatggcttaaaaaatattggtataaaattccgaattctggtgatttacttaaaatctttttcgatttagtttttattatctcagttatcttctattcagaaatgtgcctacacaatatagacacacaaagcatttgtatttgaaggcaaaaacaaaacatccttgttatattaacttaactgctaagcgtctggaggagggatgaaaacacagatttgtgtggagttgaatatggacatatgtgtaaccatcctgagaacgtattggtctttatcaattttaattattatttcaggaaaaaccaactttagagaccaaatcatgttatagttatgtattgaaaataatctttttaaaaaattgtttgaatttaacttctcatgttttcctgatttttttaaatttttaatgtctctaacattgaatatgctaaatcagaaattatttctcttttcttaatagactggaaggaaagaaaaaggagatcctctcaacattgcgattgataagatgactaagaaaacaagagatctaaggagacaggtactattttttatttttactttaagtccatgatattcagtagtggtttccaacaatatccttttccagggtgtcttcttggagatgacaatgaggttgttattctttataacatttacatatacaaataaaaaccccattttatcggcaaggtagagattgctggacagagacgagccagttgcaagcaaggagacagttcctgagcaggtggcttctcactgcccagatccaatctgtcccagtggagactggatgaattcactacttctacatctggtctttagttttccaaatccaggtatgccaagagcctgcctctgatctttgctggttcttacttatcaaactcccgggaatttagtgataaaccagaatgctaatggttaatgagaaatacaactcttaatctgatgggttaattaaggtctcttggccagtgtattcccttgggaacataaatctaggagaaagtttgcttatcagatggttgtttgggaagcagggaataaaatggctaatgacatcattagtttgatgggtctatttttcttaacagggagaaatctccggtcagggccctttttctccttgaaagtgttgtatgaacgctggtaaatgttgccttagaaccctgattttatatgtggccatgatgaactcctctttctttggtagtattatttctctgaaagagattctatcacccactgagttataataaaaccccctcttcttgatttctgcccaggagggcagaatcctgtctcctgctgtagctttggctatgtccatctcattcactaattgttgactgtgacagccagctaaaaccaaccactgccatggcagcacctgctgtattttctgcagctgaaacaattgggttagcatggccacatccagcatttgctcctgcagtgtgttaagtacaaacaaaattagcaagaggcctgggcgagaatggccaagcagcaacttggaaatgatttgaatgagaggaacccaccacttctgatgactgctggggagcttcttggcttttatcaagacatcacctgaaggtgtagacacacttgatctggtgtccttcagaagatatcacaattatttctggaatatgaatattctagctccccagctaacaaaccttttgggggaaacattcccttttactttactttgaaataaggcagaatacaacattgtccttttaggtattagtaactaacagcaaatgaatatatggccaggtctctatctctttgttctcttagatcatctctacatatccccatttgatatgaaatgatatgggtggcaggaattgggatggaggttagttgaaaacgctgaattagatatcagagcccttggttttagtgttagctctgccgctaaactggcagtgtgattgtggatccttcatctcttggtcttacaaaaataaggagccaaactagatctgcaaactcttttttttttaagctgtataagattgtgtgagtctaagggatattctcattcctatgtcagaggtcccaatgactgataatcacagatttttaaaagcagtgggaggacatctccaggtcttgcctttggctagattgtcaaccagctaaaattcatgaactgggtcttcccatcttcctgatcccttggtctcagtagtgattacatttttttttacattcaagaacaagccccctcagctcttttcaatcatggaccaatcatggcaggattattattattattactagaaatgaatgaaaaagtaatttttactcttatgttacaattcctggaaagggttgactctttttagcagaggacagtggtaaaatttgaaggtgaaaaattatggtggaattttaaatgcttaggtgacaagctccttggagagcttcctgtaagatggcagtggaaggagtgtgtccttccctgaagttattccatgtatgttatttctttccttacctttctccaaaatatagaggaataagggtaaaaggagaaatgtttcatggtattaagatccaacagttatggcataatttcacactgtatccatgaatttggttgaaacatctttctcttctccaatctgcctttctaaaatgacgatggtccccatctgtcagtttcatccctgcccatatgttgagatatttttgtctttcttctcatctctttgcctccccatgtacacctgtagtggcacaaaagcttctctgatctaaattgaagctacctagcacttgggcagatggaacatgcaatgactaatttgtttggcccaggtaggtcataagcttagatgtgggtaactagtaattagattaacaaggtgttacctgggtctctgatagcccctccacaatagtggctcagagaacgctaatggctcaagcaaatgtatactgctgagatactttctattctttcaattacagataaatgtatgctagagcagattctaaaagagatccctcagtgatcatgtccacttccctgtacacatgtattcctttgtataatatttagagagatcaaatctcataggggaaaaaggtgaaatcaaatattttagtttataaaaaatatttctagtgacatccatcatgtcccgctctttcagtctcctgcctcctcctcatagcgctaagtttgggcagtgcttttcagaagggtgaccctggagccttgaaaagttttagccaccaaattgaaaagaaacaaagtcaatcatgatcattatcttggactttcctaatgaaagaaagtggaattagacttgtagatactcaaagaaatcaagattaattgaatataaaggattttggtttaagtggaattttcaggtaagtagaactcctctcttgaggcaacatatcccaaggaactggggcattataaatggtgaaaaagattatagggacccaaaggtaccatttaaaactgattaacatgaatccatcttgccagtcaaacccatgacagggggcagtggtagagcagaatcctcctaaggagtattttgtttagaatcaaaaatggatttaggggatgataactgccagctttaagcattgggttctcattttaaagctgtgggcacagcaggccctgtgtctgagctattgtcactgctgtgattctggaatcagcccagtgtggaaacaatagctcttggctgatgccccttctgggtgcctactggcccacatggtctgtccatcccccagagaagactcagtcagtttctgccaactgtacccctattcccttttgctctgtgccacctatgaactattctaggtatgatctcttaatttttcctacaattacagggatgctagttgattctgaatattatttttgtacttttattagtccctgattttccaagttgataaatcagcacccaaacatttctctctgagaagctaataaataatatctatgacattgcaatgttgctaaacttagcaactctttcactccccaaacaaatcaaaggcctaattcttattccttcacccttactagccaccacaatgagtccagcaatgagatttagtgagtgtcaacctgacaaaggtctcaattctattattacaatcaaaacatttttaacaatgagaatttatatatagaatgcttttgcattagggtgagtacttagaatagtaatataacaaagcattaaaaatcaataagcaaaacatgttattggatggaatgtttaaaggctgattcattaatattgtgtttccaagtagtactacagaaaaatcttccaagattaataaaaaacaattacaactaaaaaattccttagctgtctcctttttgacccaattccttatgtacaaactctggctgaaggtgaacagttaccatggagagcttgtaaaatcactgtccataaaatgtaaactaatttataacccacttgtattaagtctttgcaaggtgcctggaactgttctaagttatctccatgtattgaccacatttaatccacacactagctctaaaagattgtcaccatgctcattttacagatgaggatgtgaagccaagtaccgtacctgatatggtttggctgtttccctacccattcatcttgaattgtagctcccataattcccttatgtcatgggagggacctggaaggaggtaaatgaatcatgggggcaggtctttcccgtgccattcttgtgatagtgaataagtctcacaagacctgatggttttataaaggggaattcccctgcacacgctctcttgcctgccgccgtgtatgatgtgactttgctcttcctccaccttcctccagggttgtgcggcctccccaaccttgtggagttgtgaatcaattaagcctatttcctttataaattacccagtctcaggtatgtttttattagaagcgtgagaacagaccagtacagcacccatggccatatagggtgtggacgtatggaagctgcagccaggcaatctggctgtagggtcttgtactcataaattttactctatcctgcctctccgtagaaccaacataagcatgtgggtcaaccatatactaatgcactctgggaaatacacgtggggaagaaggaaggttcacataaatacgtagaagtgctttgaggttttgagcagcacctctacaactctaagatttggaattggtggcacgaatgcactgtgaaaagaaagaaaaaacacaactatagtaaatgtcaaaaacatggttcttgtttgtgatatatcatctcttgggtctccagctgttatggttcattggattctctttttaaaaagtgcaattatgtttaggtatctggcctctcaaaacatgaattatagactttccagaacaattacagaaaaaagagaatgttaaggcgttctattgtttttctcacatctgctcatgatagggccaattatttttaagttcattgtaaaaaaattttaaaaccatttatttctggatttgaatctgtttttcttcataaggatatgaggctatctacatggcaacaaaatatattacagaatattgagttcctccaagtgttaaggtttgtgttctgtaaactgaaaccctacataagagctaataatccctggagtttggagtctaggtcagattgtcaagctgctgtggaaacatggagatcagaaaatgatcatgcagcaaatgggatttgaaatacaagaaacatgaacccagagacagctaaatagaaatgggatcagaggctgggcatggtggctcatgcctgtaatcctaacactttgggaggtcgagacaggaggatcacttgaagtcaggagttcaagaccagcctgaccaacatggtgaaactccgtctctgctaaaaatacaaaaaaaaaaaaaaaaattcacccggcatggtggcacgtgcctgtaatcccagccacttgggaggctgaggcaggaggattgcttgagcccaggaggtggaggttgcagtgagttgagatcacacccctgcactgcagcctgggtaacacatcaagactctgtctcaaaaaaaaagaaagaaagaaatggaatcagaaacaccaaaaattagaatcaaaaataccaggaggagcggagcagagtaggtagtaggttggagtgcaatggtgcgatctcaactcactgcaaccttcacctcccgggctaaagtgatcctcttgcctcaggatcccaagtagctgggattacaagcatgtgccaccacgcctggctaattttttttttttttttagcagagacagagtttcaccctgttgtccaggctggtctcaaactcctgacctcaataccgtgaaaggtcatcctttggatgtatcccttgatgatgggtagtacagtcacgctacctctaccttaggaaaatcctgataaaacaaccctaaatgtcagagcaccatttacttatcacctggaaaatagtcattaggccaagtccaaagtacattatttcatcagttggaaacggttcttgaaatatcatcttgggctagctgttctcttgtcaaggtactattcaattcacaaagtggttcaatttatttctataagccagcatatggttgattgttcacacattggcttgacactagcaagtctagatcacacaaaggagcaaagagtctagtagcttgatcaacattgtttcatcaaatggtacactatactgagcagagggatctataacgtaagtatgaacatgaaaactctcaatgaagtggaagcttcaactactgatttattcttttctgctaatttctctaggccctagaaatcaaggaaaagtgggaagggaaggagtaaatagcaatgactgagccccaaaacaccttccagataatgtctgtgtttggttcaattcccaacaccttcttctatttttagcaaagagaataataccattaagaatcctgatcctgagactggaagatccactgtaggattatgaaacaaaaatgccatcacatttttcagcatgaaattcctaagcagggaaacttagaatattttcaaccatggtgactgaaataacaaagattgtttcatagaatgccctttcagtttaccagaacattcattttactacacccatcctggttaagtgaggttggcccatatttgttgttggaggctgtgtttagactgggattcttatccaaaactgtcactgaaaacgagataattttagagtgtgtggtgcatctaccattatggcctgaattgaggtgtttctagagctgatgataacagctaatcgccttgattctgactgaatgtactcagtggatctttgcagtcagcttgtagccaaatatatctgttccatttgacccctccttgctgaggttaccttttattacctgaaatggcttctggcatcatctttcccaggggaaatttccatcaggactgctgatatttctttatctccccatttcctgaggaggctggacaaatctgaaattcagaaagtgagtcatcttcctgcaggctctgccatgcctactgtcgccaccagtcctggtgggagcccatttgctccaggatgtcctcatattgtgccttagtgattcccatggatgctgctgctgatggctgagggagttcaacattgctctttgcttgggtggaaaattgtgaagaagatgatgctagttttaacaaccctctatttacattacatgcccttgactcatctttgtcctctttttgagctgaatgaaatttccagattatcttaaaaccaaaccttcaccccaccatggctctacacaattatgtgtttcccactgtgatccacttttcaagacagtgacagtcccacgcaactcctccttttgttattccttaaatctccgtcagtcattcaatccaattgataccacctcctaaatgcattttgagtccattgctcctctccactgccattggccctaattcactgcttttcacacacacaaaagatggccatggccacaacctcataaccagtatcctagaccccagcctcctggtagctcctagaccccagttatgattgccccaacagtatcataagccagtgtttccagatccttctgcctttgcacttgtgttgcttctgcctggaatactcccaccaccctttttgttttcttccaagaaaactcacatcttttcctaccaggcttagcttaaatgtcaccttatcatcacaactttatccaattcctgtaaacaggatttatccagtagactcccaaagcatttaaaaatatctctatcatgacacattttgcagtgggtttagttgtttatttgtttttgccagtgctcatgtctttctagtctttgtttcttcaggtaatatcctagtgcccaaaataaagtaagcctgcaccacacaggtgctgaaagagtgaagaatcccctgtctgtagtcaccgcacccaggaaatatcccaatcatcaacttgcctccattctaaactcacatgtctctggttccattgtctcaagggctaaaaatgctagtctaaaaagtctacttatattttgaggataatttccatgattaatgaggataccctaatccagtagtttcctgttactcagttggcttgagaagacttagctcaagagcagctaaaatgaagatatttgactccattttgggagattctgacttcatgtacctctggtggcaccttaaaatctctgtcataacaagcttcctacttatttctgatattctcccatgtttgaattccactgtctttgtttctgatagatggaactttcagacctcatcccagtccctcaggtggtatatctgaggatttgtgaggccttccaactcttctgcaatctccttggcctctattagacctttccacttcacagagtcaatacctgttttcaggggcagaaaatccatgtttgaggcttgtaagagacagaaaaaaaaaaaacagtgttttgccacacactctccatagcacacattacctctagtcaccaaaacgtatgcggtatgattttccctcactgactagttctttgacaccagctgtctgtcctataattcaattctaacactatctacctggagataacttcagatttcatagactaagggctcattttcacaagactgcttctacttcagatgccagttgaaagtagtaggttgtcacctatatttctgactgaccagctatacattgggggattcccattatccctccctcaggtccacctaatttgccagagtggcccacagaactcagggaaactgcacacttttacctatttattataaagaatattcaggtgagcagtcaaatggaagagatgcataggatgaggtatgtgggaaggggctcagagcttccatgccctctgtgggtgcaccaccttccctgtacttccattttttcagcaaccaatagatttccaaactctgtccttttgagtttttatgcattcataggcatgattgattaagtcattggccattggcaattaactcaaccttcagcttctctcacctctctggaggttggggtgggtggggctaaaagttctcaccttctaatcacatggttggtttcccttgcaaacagcctggatcctggggctatccaggagcccatcaaaaattgcctcattagaataaaagatgctgtcacccaagaaatttcagtggctttagaagctgtttccaatgttaccacctaggaaattacaaagattttaagagttctgtgtcagttactggggttaaagatcaaatattagacaaaagattctcctagtaccccttatctacaagggttttaggaaccagggcagaggtctgaacgaggggttcaggaaccaggggcaatggcaaatttatatatttctatattatatatttatataatttataatatataaattatgtttaatataaattatatatttatataattctatatatttatatatttcttattatttcacaaggctcctctcttctgggcataggttagaagtgaatggtctgattgttcactgcttcttattgtagggcttggaaagatctgtactttctggagcagggccaggacaagggtaaggcaagtgaggcgtagcctcaggtgcaagattttaggggctaccaaaaagctcagtaatcacaataaataatattgtgtgcaacactttaaaaaatcaaaaataatgcagaaatccatgatgaacaaaacatcaatgttgtaaataaagataggatcatcataaataagatagtgcagtgttgagtcatgttgaagctggaagcaaaaggaaaatcagcaatactgattctgtctgtatttacaatgttgctgttttcttcatcatggacgaacctcttgttagtcctggctgtgctccagagcctctatctatgaaaatctttattgcacctgctgtaggagaaagttcccccgcaaagtctcaatgtcagatggctttctttttcctttcacagtagtgacaaaagggctggcttttaaattttatgagatgacacgttggactccagattcgaagacctatttgaattgtggttgtcttttaggttgtcttgctcaaaatgcatttcttcttgatgtttatcacagtgacatgggctttttatggcattccgaagtactttagagaaaatggagaacactttaatactgctgatttactctttcaggtctacagtaatttccttactgcctaattataaggctgggtttaatttactctacacataatgtttactgatgcacatatggtgccacttttcaagaaactgtgcccagaacaggcatttttgtcatactagagtatggaaaattcccatttagtatgatattggctgtgggtttgtcataaatggctgttactattattttgaggtatgttccatcaatacctagtttattgagagtttttaacatgaagggatgttgaattttgtcgaagatattttctgcatctattgagatactcatgtgatgtttgtctttagttctgtttatgtgatgaattagatttattgatttgtgtatgttgaaccagccttgcaacctgcagatgaggctgacttggtggtagtggataaactttttaatgtgctactgtgtttggtttgccagtattttattgaggatttttgcatcgatattcatcagggatattggactgaaattttctttttgtgttgttatcctgctaggttttggtatcaggatgatgctggcctcacaaaatgagggtgtatgtgtccaggaatttatccatttcttctagattttctagtttatttgcataggtgtttatagtattctctgatggttgtttacatttctgtggggtcagtggtgatatcccctttattgttttttatgtgtctatttgattttctctcctttgttcttttttagtctagctagcagtcgattttattatttttttcaaaaaaacacagctcctggatttgttgattttcccattatatagagaaaaaaatagtaatatatgtaattctctcaacaaagaatgtcccccagtgaggggggaaatatcacatatcttcttaacttgaataaggttataatctctttaaacacttattttaaaagcagactagtaagtatgtggttacatgtgtctaatgattttcagttacccccaaaatgaggagatgggtaggagttggggaaaggagaaacaggaaaaatagtactgttttgtggacttatttgttaactatctttgaaaaggagctattgattcagaaatcgtgggttcgtaggttcttaggggtggaagggacactatgggtcttcccagggcaagaggtctttcttcaggaatattaagatgccttttgtttacctcagctttaaagatgggagctaattccttcactacagcagttggtacaattattgggtaattttacttgttagaaaattgagttaagatcagtgattttgtagttatcaaccattgatgttgattttttgctgcaaaactgatttctcttcctatgtctaagccccagataaaaaattcagtaaagagctctacttagagttccagagacgtacaaatattaaacattattgcattcaaagccatggcttcaccaacaattgccttgccttatcgtagctatgagtgctaagaatggttaggcttaggaactgggcatgtctctggtcattgagacaactgaaataatcagccatcttgatcatctgatctattactcctgtttgtatctggttatgtatgaaggtcagaaaagtaaagctgtccactaagactgacagttttttagtgtccattctttacttgattctttattgacgatcgctgcaattcttcagagagatattactatcaaaaagattttttttccgagtagagtattgaaattccaataataagattaaatttcttgctgatataaaactcataagttagaaaaccctagtgggttgactctgaagcctgtccttttaatgactgtggttgttaaagttggtacactttgctcttagtttatagcttttattaaaattctttaatgggaagagcataaggtaaatatcaattattaaagagacctgagtttctctataataattataataataggcttcgtgtctaatataatcaccatttctttcttccttatgccattcatatctgtgtccagctccatgccagaaactgaactgtgaatgggattttgataattattattctaattaatcgtaagggaaaaaacttaaggactttcattttagctgggggaatatctgattaaatgcatatcaggagactagcagacttgcctggtgcattcattgagaaatggttgaatggattgtgcctgagcattccaggattaaaggagaaccatttgtcctgaggagtttgaggataagagtggatttttctctttgatccaaccataaatgtcagaagtttgggtgattaatcagtcccagacccatcttctttccttccataatttcttagtttttcacgaatgcatcaatcctgtttaactgttaagggcagggcttctggatttttatttgattccttcaatttcaacaaggatcaggctgccttaagtagtagctacactatgagttgcaactatctaaagggagtgactgtaaagctaaaaaagcacctttgggccacgcgcggtggctcacgcctgtaatgccagcattttgggaggccaaggcgggtggatcacaaggtcaggagatcgagaacatcttggccaacagggtgaaaccccatctctactaaaaatacaaagttaggtgggcatggtggcttgcgcctgtgttcccaggagaatgacttgaacccgggaggcggaggttacagtgagtcgagatcgcgccactgcactccagcctgggcgacaagagcaaaactccttctcgaaaaaaaaaaaaaaatgcacctttgagcaaggctgggaaaccagaaaaatgggagcgggaggttgctgagttccaaggggcagggagaagtcagcactaatggactctgagcagacttcttcagcccctcctttgaaatacaaaagcttagatcaatgtggccctgaggctgtatctatagataccaaattaactagttgaaaggggatggctgggcgtggtggctcacgcctgtaatcccagcactttgggaggccgaggcaggcggatcatgaggtcaggggatcgcgaccatcgtggctaacgcggtgaaaccctgtctctactaaaaaatacaaaaaattagccgggtgtggtggcgggcgcctgtagtcccagctactcgggaggctgaggcaggagaatggcgtgaacccgggaggcggagcttgcagtgagccaagattgggccactgcactccagcctgggcgacagagcgagactccatctcaaaaaaaaaaaaaaaaaaaaaagaaaagggataacttgtgactgatcaagtaggcattgtgtcacaagttgccatagcaaccagcttgcctgctgctctgggtgcattctctatgtgtttgggcggtctgtggaagtacccttgatactgttgccaaatcagcaggaaattcatgatttggggtccagtccaggtcagaacacctacattaagcaggccagccaacccaactagatacaacttctactcttccatgtaactttcctcttccttccttgcctcaaagcttatattagaaaaggaatttcttagggaccactagaataacctttgctttctagcagagtatgaggcagggaaataacaaaagtcgtttggtcaaataccagtcacactgatcacctgggggctcttagaggccacagttagcctcctcagttctcttcttaaggagatagcttctggacacagcagatgcttggttataagtaagcagtgggtaaatggagcttgaaatagccagagattgcagtagaaacttacgtatagagtgagaggcatataagactaaaatccactgatgaaaccatctagaacaggcatcagccaattactatctctgtcccaaacttagccctctgtttgattatgtaatgttgtattgactgcttttgtgctacaactgcagacttgcgtagtcatgacagagactaactggctcacaaaggacaaaatctatgttacctggccctttacagcggagagtctgccaatccctgctctaaaagtaaacctagcttgagataagacaaatatggtgtaagcacctgaattccctgaaaagctaaaggaccttgaatccaactacgtttctcttaaatagcgacagcaccagtcattttacaggatttccacaaagttgggaatgtggagtaatcattgggcttctatctgaaatgaagtacctctagggaaaaattcagcagctgttggaaatgcaaggctgtgcaatagttaaagacaggaagtaaaaagtattgcatacggcagcagaactctggagagggaaggtagctcagaggtacaccgttatccataactggagtaaaacaggggagtgtggtaaatggttttctgttttagaaagtgtgttgagtcctttactgaccacaaatggccagaaacttcagaggtacatttatcagtgacatctgcaccaagaagtaaatgctcatcattctcccttcctcactcaacagcatcttattcccccaagttacccatcccactccagtgaactgaggtttcactcatacctagagtgagaagtagtgagttttgtctgggttcctccccaggtgcttatatttataatagacgttcttctaagacccacaggacttgtgctgtaatgtggaatgcatgacatgtggaagtacaggccaggtgactctacctggtaccaatcctaccacaccgtaacaggtgtgtaggatggaccccattagaaagaaataatagtttttgagagctcgtctctatatcttgcttcatgctctttaaccacacattttttataggcttctgctcttagcctgccatcaaatccatccattcagtaattgtctttcccaattaccaattaaattgtgaggggattaaatcatttttggggcatattacaagcttcctaaaggtccttgctagggtaaggctattctgttactgatgcagcttttgaccctttcacactgggctcaagaagcttgtgcctattcaccaccagttaatcaatggcagatattagatactcagaataaaacatccaggcatctgatcttagatctccctttggagcaagcaatggtggttgggacataaggctgggagtaagtaatcgactaggggtgggagtgaagaattgaaagaaaagtgacctttgtccagttaggatttgtgaacttcaacagccaggtccataaacacatagatcttaagtaaaatggcactactattggaacccgaacacctgactctggcattttctatatgcaaccagaggatcctctctttcctcatctaaacaacacaaataacgatgctcaccctacaaactgcacccttcacccacaccgtgacattgtaaggaaggtcaaatgaaacaatgtctaggaaagttctctgcaagctataaaaacaggacatgcacaggattattattaaaaataagcagccagaaactgagtagacccttccaaatacgcagaaaagttgacctgctttttggtctgggttcagcgatctgagcaaggtagttatgctagaaatgtcttttccaccttcacccttgccacctaaaatttcacccttttgaaatgccaactcttctgggctaagttagacattgggcaatagaaagaatgcctgttctgatggaggggtggagaaatcttaagagaatctttaagtaataaaaaaaaaaagtgcaatatgatgtgaaagaaatgtagaaacattagacttttttacagtgttgtttaggccagcctccaatacatttgacgggaataactcatgcttacctgtaagcaccatttatgaggccagtcaaccatgtgtgaggtcgtgttgatcgctgtagctttgttagtagttgggagttgagacagtggaggagttttcagcagaaagtgagaggagatggcttgtcttgttttcttctgtatccctggccaaaaacagtgcttcatctaccaagagctacttaaatgccagtggaaggaataaatgacggaacactggcccttgagtacagtttagtaaagtaagtaagtgataaagcataatttctttctgaggacttcttatttctcttataataaggttcctgccacctctgagctaattgcattagtatctgtaccatcatattttggtacgtttactctcatttcgtttctttggcataacacttaaaaatcctgactaaaactgtggcatttgtgtagatttttctttatagatccattatttctcttgagattagaaaggaatttttgaatttcacaattaaaggcaaataagagaacttttttagtttttcaagaatgaatatttctccagtaaaaggaattgcagaggtgtttttcattgagtacattaaaatgaggcacacagccttcaaagtcttatgcaagtgtgagcttctgcaaaactagttgactggggagagatatttttttcttggattgtcttttgcagggagctgtttcatatttatcaaatggttgcagatttttagactttgtacaaaatacttttgcagtattagatgtggctcaatgtacagcatacactcctcataccccacccaataggtagacaacttttggtcatttttgagacagtttgtttttctttttgagttagtgagttaaactgtgtctattctttcacgactgtgtgctcccacgaaataagaattgctagagcaggtatgatctattgactgcattcctttgggtttgctgaagaaaatgcagttatttacattgatgaatagccttaattgggtaaaatagactggtagtgctgagctaatacctttaaatgtcttgtcttatgcaattaatattcctttgtcacacatacgtttaaaccattggaaaaacgtcttgtgttcttgactcctgtcagacttaacgaatgattttgtcaagtcattcctttctgccctggttgattgatagctaaattttggtcttctagcttatgtaaaaagtgttaactatgcctttcagcttgtaggcaagggcatttaaaccattctagtagtcaatttacagaggaattacattgcctgtttactggaggggtcaaaaaaatgtgcccctgctcatcagagacacaaatcacagggcccatgagctaatgaaggcagtatttatgagtttctgcacttgttagctgataccaagttcaagatgtccctggtcctggctgctgaggattctggcttccacttttggatatgcctgtgtttatagactatggaaaagatgtatttaagaagaagttttgatcctaatactcttaagagtgagaatgcaaattagaatgctagattgtcacagtatcaagctgcatttgcagctttcaaagatttctctatagtaaggctcacctctgccaccacctggcttatggatttccatataaaccataattaccatatcaaagcgtggaaaatggataccagtctttctgggagaagtctcttggcccttggcttgaacccagttagaaccctaagaaacacactttctttagcatcttacaatttactattttaaaacattttgatcattaagagttataagaaaatggttacattagagcaagtataattcatcaaatagattgttgaagtaggcctatcttagaccacaagttctcctttttttttccgatccctaaatccccagaaagtgagaatctcatagtgagtatcgagcaggtctctttctactcccagagtagggattcattaggactcagcatcacttctacctctggtaggatcactgattccatcttatggtgtccatctgccatgggttctcttcttttatcctctccacaggggctcttcttctttttggtcttactatatcatgggtggggaagaggggagctttcagaatcccttgtatatatactttactcgttcaggaatcacatttgttcctggaatgtttgctgctgtcatcatatataccattgcttttggtcaataatgttcacagagctggcacaaagtagacaagtgacagcttgtgtatgttagtatttaaagcatgtagtctggggccaagcaatattggtttaaatcctgccactgccatctgttagctttgtgaatgtagacaagtgacttaattctattgtctcagtctcctcacctataaaaggaataaaatagtagccagtgatttttgacagaaataaacaagttattctaattttttggagcagtatctggcacaaaataagcactaaatgaagattgctattatgaaatattaatattccccaatgcttttctgctcttgccacctctcctcatctcaccgctgcagttacttctgtcttttgcatatactctcccttccactagcctctcctttgctttcttgtgctgcacccagcaaccgtgggctccattttctgctaacatttttaacagcaccatgtcaaggtgctgtacctgctagattaagccatctggagatccacaatgatcccagcactccctgggaccctgaggcagcttgtcactgtctcttctcataaaggcaagtgctcttgcatatcgtggaggtaaaggaggaatttgacactgacctgtgcgtgctggggcagaaaatgaaatcaacagaaggaactaagtacctgttactgtccttcaggaaaagtcccgatcaacccttccctgtcctagtccccatgacttgtctctttgttataacattttaagtaaagcatttgtttaatctatacaaatagtaaattacagctgtgattttcttacacacagcccatggctatataatggaacatgaggagtagactactgttatttcagtgcatttggccaaagaaatgaattgaaatggcaccaaactagtccactaattgatcagaaattattttcaagatgtctctaccacttcaccaaaaggtgatttggtgaccatgaaaacttattctatgtatgtcatcttatcagttatctattgtcacaacagtgtagtgttaacagtacctcaggggcatacagcaatagcacttgtagctcactggtctgaggcggtcatcttagcccggccttctcctgtgtctgggttctgttgctcttaatggatctaggatggtcttgacatcgatgactgaggtgactcagtcatggtcaataggttcgtcacccttttcctgggacaggcagtctagcctgggcacatgcttctcatggggatggcagagaacaagaccaagccggcctaacgttgaatgagcctttcaaatgtccacatgcatcatggtgtccaacgtccattggccctaaacatgacacatggccaagcccagagtcacagagggcaggcactacagagttacatggcaatggtatggatagaaggagatagaagaataaggttattcatgcaacaaatctactataattatctattccatcagtgagacatgttcctaacttttatactgactatcagcactcacagagaaaaaaatctaagggcacatatgttgatctggctgttgatctggctccattataagtgttgctaatgatgacagttgtacttttaattgatccagcagacctgaatgaatttggtggacaatgaatgagatgggtagggaaaagcacagggcctgatagagctaattggttccattaaaaagagatgctagtatcccaattaaaatgattttgcttcatgaaagacagttggtttcatcaagataatgaccagagaatttcgtgtttctcgtataaggaaaactaaataaagcaagaaccatgattattctttaaatgtcttccctaggctttatagatatgcctctcctcccgctacctgctcccaccccaacctgaacaatgaagagtgccttcattaccaatggagtgtgcattgatggcaccttggcttattaaagtgactttgggtagattatagcactgactgattaccctcattgaccttcagactggctaaactttgccagacttaatgaagctcactacttgtcaagccccctaggctggatggctcctggctcagtcactttgttgctttgattttacatttttaataacaatgataccacacagcttaaggaaatatggcagaacatgtcagtaatcatgtagagcctggagcagccatattcatggaaagatttaaggcttcagattttttgagcctatttgaaatcaccctctaaccccagttttgaccttggctggtatttcttaaatcattgtaatgaagaagttaacactattattcttaacaagatttttgtacacatttatctaaatgacagggtagatgttaaatggtcaggcatttattaaacatcatctacccagcctcaacttgggtgttaacttttatttctgaaagtcaagatggcattgggttgctcagacacatagccaattctgcctaaagattggcatgcaaaaggcttcaactgcagggaaggtttagcaaagaaagaaagctttcatcctgaaggagaaacaggattgattagtagtagctacttggagcactgtgttgaaaaggattataaagtagtatttgagcccagcataaaagagtgcagcacttgattaatcatgtctggtgtggacatagaaaggaagcattgtagcatacttgccattcctgtcctagttcatagcttttgatcttgttccttataaacaactcttcaccttttaattatttcttataaatgtatctctatttattttcaacttccactcatgcttgaatccctgaattagttttctgtcagatcttttctttgctggccacttttttgttttcgggtcagtatctgagttccttttctgtgttcagagaattcctcatgttatgaatctctgtataagaagcttaaatggccaaaacacttgttttcaaagaatactttcctcccgaccgctacctcctgtactcttgcaactagttgaggacgtatgacccagagttctggtctctgtttcacccagatgaaaatcaggtctgcctaacattttgaatcaaaacctattgtcacaaagacacagggtgccttaacatttctgaattttgcctattttgtgaactgacaggtcaatctttctgcttaaatcagctagaattagtttctaatgcttgagactaagaatttgacaataggtcttctagggaggcattcctcaaactttatactgtggaataatcacctagacatcttactaaaatgcagattctggttaaaagcaggtctggatggggccttggttttgcatttctaataagctcccaggaaatggcagtggtactggtcagtggcccacacttctagtagaaaggatctaaataagggaaggcagagtttgtaggaaaataaaaagtctatttccaggttaaattagggcaggccaactacgtagctaataaacttcaaaatgtacaaaggctccgaacagcagaattacatttcttaataatgcacaatactgggtcagtaacagaacactaggcagttttccttcatgtatgcaagggcctaatttaattgggaggcagggaatgtcttttatcttcaactcaaagcacctctatctttggccatgggagcctcctgttattctggcttgcccctgggagtctttgatagttctttgctacctggcatgacaagatatttcaagcttatttgtacactcctggcctcagggtgcctggagtcagccctttctccatgaagctctgttttttttgtttttttctttttttgtagtgtaaaattgtttttcaagttgttcatcactactaggctagccattattttcagtctttttcattagacagaactgagaaagtgtttgcaagtatgcatatgttttcaatttaaaatctcatgttttcaaacgttggcaaggatatggagaaaggaaagctttgaacgttgtttgtgggaatgtaaattagtacaatcatagaaaacagtatggaggtgcctcaaaaaattaaaactagaacttctgggtagaatctgatggaaataaatcaatatctcagagatatctgcacccctatgtttattgcagcattatttacgatagccaagacatggaatcaaccaagtatccactgacagataaatggattaaaaaatgtgataggcagataaatagatatatacacaatggaatattattaaccatataaaaatagaaatattttatatgtgacaacatggatggacttggagggcactgtgcttagtgaaataagccagacagagaaagacaaatactgtatggcatcacttatatatggaacctaaaaacaaacaaacaaacaagaggtggaactcacagaaacaaaaagtaagccagtggttgctaggggctggaggtgggggtggtgaaacgggaaatgctggtcaaagggtacaaactttaagttatacagtgaataagctatgagaatctaatatacaccatgatgactagcaaaaatgctgtgctgtatgcttgaaatttgctaagagagtagatcttaagtgttctcaccaataaagaaaaaaaaaggtagctatatgaggtaatgtatatgttaactcaattgtggtaatcatttcacaatatatatgtttataaaaaatgtatgtttatcaaatcatcatgttatacactttaaatatatacaattttatttgtcaattatacctcaagaaagctgaatcaaatccgatgtgtttctactgacatttctacttcagatctaacactggagaatttttctttaactgctttcttccccaccaacactcctggttagcaaggacataggaaatgatgaattaaaatttcatagttaatcatttgctttcttctacctttaaacgcaataatattggaataataatattcatacttcccctataattaaaattacataaaatacttaaaatattttggtgttttctattccctttctcatccccttttcacaatgttgtaatatgtctttattgtcagagtatataaacatttatactatattctatcactttttaagttaatattttcctagatattttaattcttaaaatattttatttcttaaaataactagataggaaaaggtcatgagaacaatattctgagttcttgcatttttatcagattttgtatgtcttatacccttgaaagtcagttttgctggttataaaattctcagtttacattctctttccttgagtatcttaaagacaatattttcctttggcataaatctttactattaaaaagtctggtgataatctattttttcctgtataaatcatatgctatatttgctgaaatgcagttttttccccctcgtttttctttagaattcagtcattttactggaaaataccttggttgataattacgggtcagtcttctcaggtacatgatacattatttcagattgtaggttatttgtttaattttaaatttttaatttttcattaacatatatatgtttgtggagtacaatatgatattttaatatatgtatatattatgaatgattaaattaagataacatattaatcatcttatatactttttttttggtgagaatattaaaaacccaccttatcagcaatttaaaaatatacagtattagaatatagttttaatacatacatatattctggaaagttttcattgattacaatttttggtattcattctgttttcttgttttgattttctttattcatggaccccctggtagccctgtattgacttttctttgcctatcttcaatatttgtcacattttctaaaatggtttttaagttctttaaaaaatattttttggatttgaaacttttcttattttatttgtcttatggcatttgatgtggtgtttattcattcttagtctttttcaaatgattttcttttatttataattctttcttgagtttcatgacctaattctttagtttttcttattctaatttatcatgttcttccatattttatattatttttatgatgtttttaatttatttgaaatggtaggttgcagttttaatctattttataagcatatctttctggcatgctttcagtgtgcctagggatgatggtattatgtttcttaatctaatttttcttataactttggatgagatttggccttgataattttaagttgctcatttttgtgcacattatcttcctgaaggcttagaaagaggcttgatgcagacagcttttcaagcttcccagagctctcacttctgttatttttgtgtggtattaacaaatatgtttgtctaattgttgagataacctgaatcttcttatctcccctactttatctcaaccttctcttccttttgtctctgttgtccctgtcaagttcaattttgattccactctaaatatcttttcctccattgtgggcctgttctggaagagagccacggcaggtcaatttcaagtgttcactgtaggatctccttcagaccttcttaccctaggcgctgccatttgttaacttatgactgcagacaaattatttaactttttaaagtcccagcttcttcatttgaagaactagtataagaatcattcctatctaatagtgtgtaataggaatgaaatgatgtaatatgcaaagattttagctcagtaaatgacacattatacatgagctcactaataaccaacattatcccaggcagtaatttaatacactttgtcaaatgagtatgtgggagatgtcaactttacatagactttattacattttataaggtaaaatgtcagacacaattcagagttaaaccaaactaagttatacatactttcattgcatacgttatagtaattcgtgcaaaaaggaattgagatttgttcttaattttccttgttctgaccaataacgaacgtgtgggtgtcatcctatcaagagattcacttgaatgctcctggataggtatatttgtttggaaaacatgcagagtgtttatcatcttctcttctgtttatttttatgtatatcccatatacattcagataattatgaacaaaacagcaccaaggtaatttttcagggacagtttcattttattttcaagcagctgccctgttttctattttaacaatgtgggaatgatgtataattatgcattgttagaagatttgggcttgtttattctcatttatcttgaagaataattataagtatttctggaacatagcaactatgtcatcatagcacctgggcacaaacagttttgagattgttagatgtttcatgtttctgcttctatctaacacaaacaatggatctagaatgggcaggagactgcacagtggccaagtttcacggttggcttcaaagtttagatctttatctaaagttctcccgacttgttggttgatgcctagatttttccttttcaaagagcctgaattcttcaactgtgtcatgattcaaaacatccagaaggttcgggtcaatgaaggatgagagaaggcctttgatgggagaggacccatagtgtgtattgagcaacaggccattatgtaactttcaagttgacatataatatgtttaattcacatgcttccatcagtcattggttttcctttaataatgtaagcactgggaaaattttaaaaagaaaataggaatattatctccatgggtaatgagagctcaaaaacagtttagaaaaaaaatgggcaattatactatttcttaattgtatgtcattttttgtttttgtttcaactgtagcttcggaaagcagtgatggatcacatatctgactctttcctggaaaccaatgttcctttgctagttctcattgaggctgcaaagagcggaaatgaaaaggaagtgaaagaatatgcccaagttttccgtgagcatgccaacaaactggtagaggtaagtgtggaggggcctgaagactagagtttaccgatgggttcaatctctgcatatggctcttagaatttcactagagagatattctattgtatttttggagaaataaagtcctggaatcattctttcctttactttctgattactgtaccccctttcgaaggaatcaagctacgaatcatctttcttttatctgtctcacaattctaagcatgctctgaaacatatctgccatttttcctgaacaacaagcaggagctgaaacaaaagaagtggaagggaactctggagtgctgaataccagttttgatttgagggagtaaattaaaatttctgaatggaggcctaggacacttctcccttttttcccacctcaaacccctgtccactccacccagtggtgcctagatgctgtccacactgggaacttgtgaaaaaaaaaaaaaaaaaaaaaaaaaaaaacccaccttccccaaagagatgtttgaacttttggtggaagatcttggggcagtactagggtaagttaagcattgtaagtatattttatgtgttagaggaatctgtgggagttgttttataaatgcaaaattttatggggtaatattgaaaaaaaatattgtacaaagtaaatgacaactaggctgcctaaatttaggagctgaaaacgaacagcctggcaaaggtaggattagtgatgtggggctaaatacaatagaaaatagagttgttgcacaacaaaatatgtgtgctagagaacaagagcccaggagggatgaggatggatcctggaaaatttagggaatggttattagggccaggttaaacttttacaggctctgagcacttaatcctaccaccaccaccaccaccactgtgatgcattcccactttaattcataataaaataaaatcacttaaaatgacagaaaacttaaatgcaagctgaaaggaaaataagttcttttttttttcatttggatggaaaaatcaaaatcctcagaaagttctttaaatgtgaaatcctctctgcttttcctggagtgggtgatgggggtggtgttcgatttagttgcatgctaagcacctgcttagtttgcgccttggttaatccagcactgcaggtgcctcgggctgaagtcacccagccaacaggaagtcctacatcaagcctctgcttctctaggatacaggctgagccatcatccatgacagcagtcagcaggttctatgtgcaaaagccttggccacaataatggaagctttgaacttcctgctgtaaccccaatgtcttgagaaaataccagcctagagctaaaactagggtaatacaatatcaaagcagtttttctggctctgttctctcatatcaggcaagccttctatcacccttcacattccacctacatgctcggagagttcacttagctatttagggatccagagtctttccaaggttgaccttggaagctctgatcactttcgtattttgagaaggggaaggcggagaaggaggaggatatgggtacagaaggaagggaagaaagaggaggaggaaaaaaaaataatgctgatgggtgctacaaagctttaaatattcacatgtaataaaataatgttagcatataaatataccatcccatctgtataattacaacatttacaagataactgcagagtttactgaaaatattcattgatggtgtgttgtagacactctggatgaagaatgggacatggatttcaagttgtgtgataaacatctactttcagtcctattagtgcctttacttcatttgcaggacatatttgaatttcaaacttaacatcttgtgtaaatatgagactggggccaaagacccagctttttccactcattctcctttctcctgtgacaggcgctggacacatccaccctctccccttattctgtctttaggttccattgtaggtaaatctgttcactacatgtgattcttgatcctcaacttgtgacaagctgaaagcttagattacttgcagctccacatttcagaaaactgcactttgcctccatcaggtattcccttcatttcccatggatggtcactgtggccagcagcattttaatgtcttgatgcctaggagatacaggggctagtgtgtggtctggcctctgtgtgactagggagtaactgaaatctacaagtttgcatatatacaaaaaaaaaaaaaaaaaacccaaacttgaaccaccgagctgagtgttagcctttttctagttttgaaaagtgtgtggatatgggcacctttcttagtttctgtgtctgtaatatgaaaaagtcggtttgtatattgattttatatccattgaacttgataaattcagttactaattctaaaattttgataatttccttttggattttctatgtacatagtcatgtgcctgcaaattatgactgttgtattagtctgttctcatgctgctaataaagacatatcatatgcaagactgggtaatttataaatgaaagaagtttaattgactcacagttacacatatgtggggaggcctcacaatcgtggcggaaggcaaaggaagaggaaagacacatcttacatggcagcaggcaagagaacttgtacaggggaagtcccctttataaaaccatcagatctcatgagacttattcactaccaggagaacagtatggggaaaaccacctccacgattcagttatctccacctggcaccacccttgacacatgaagattattacgactcaaggtgagattgaataggaacacagccaaaccatataagtgtatttcttctttcccaatacttatagtttgtttttttttttttccttgcattatagtactagctaggacctacagtacaatattgtggtgataaatatttttgtgatttctggatctcagtggggaaatttcagttctttcccattaattatattgcttgctctatgtttctttcagatactttaattaggtcaagctagttctagtacccatttgccaaaatacttttaaaaaactatgaataactatagaattgtatcaaatgctttctctgcagatgttgagatgattttctcgtctcctttattctctttcagaggaattgatatcaaagttatgctttcccttaaaaaatgaattgaaaattttttcttccttctattttttggaagtgaatgtataagatgagcctcatttattttttaaatgtttggtagaattcactgataaaacaatgtgagtgtggaaaggtttaaaatcatatgactatttaatttttttaaatttcttttaaggtcagttttgttaatttgccttctaggaatttgtcatttaattttctaatttactggcataaaattgtccataatacatttgtattttttgttagatgtataaggatctgcagtacggtttcttttttccccactcctcatttagctaattagtatgctctcttttttccttgattagttttgcagatagtttatcaattttaaaaataagctttcagctttatagatttgtttgtattctattttatttatctctgctctctttatagttctttttggttttttcctgctttcttccagtaaaacttacttcttcttttctaacttattggaatggataatcatgtcattaatttcttgcctttcttattttagtgctgtactcatttaaggatataaatttccctctaatctatgcttaagtctggttattttctactgctctaattttaagttcacttatccatgtgggtccaatatactcaaaacttatatattgagttcaatttttttttaaatttctagttgattcttttttaaagggactccaattctctagtaaaatttattatcaggtcatctcctttaaaaaaatattaatcacagttatttcaaaagcctaagtcaaagaactccaatgtttggatcaattttgtttttgttttggggcggctccacagatggcagcccccaacacatccaaaatccactgggatgttaatattgatgatgcaacacacccaccaagagggtccagacaggtttattgctcatgtaatgggacttcagggacagcagagcaggcaaccatgccagttcataatggttcaaacaaagagaagaataagtgggtttagtttttatcatgttagggcatgtggctgggatcaggatttctatgtgacagccaggatttgagtggtttgtatttcccaatagcaataaaaaggtggcccctcttatcagtttgcccattttggggacaaaagggaaatgggggaagggtaggactgacttaaaaactgtcagcaaacgttctttttttttttgagatggagtctcgcactgtcgcctgggctggagtgcagtggcgcaatctctgctcactgcaacctccacctcccgggttccagcaattctcctgcctcagcctcccaagtagcttggattacaggcacccgccagcaggcccagctaatttttgtatttttagtagagacggggtttcactatgttggccaggctggtctcaaactcctgactttgtgatctgccctccttggcctcccaaagtgctgggattacaggcgtgagccaccgtgcccggcccagcaaacattcaaaatagactagcactgttcattacagttcacccttattgtctgactgatgactggaatgtgccatgtttcatattattgaatttagacatgtttaagtgaactattatgggactctatgaggctttgaaaatggagacagactttattgcttgtctgtttttattaatttttcttgtgattgtgttttttgatatgctgggtgatattggattgaatggcaaacatgtgtgtggacagatatagagggtctggataatgtgttctccttccagagaggattcaccctattttctgttgggcagcagagaggcagaccatttcattacaatcaaagatcaaagtgacttgaacctaggttgtagcacttctaaagtttagcttacccttctttcaccacagtcctgaagaataatcttccagggtggccaactgaggatcagatgtgtcaccttatttgtgaaatcacaaaccccaatttttgttttttaacaccacgagactgagtttgctttgccttgctttttggatggtctcaatttgcttcttgcctgttgctatttgcaacttaactgactgtcaaacgccttggggaaaaactggggatgaagctccaagctcgcttctttgaacctctcttctctatgggatcttaagtccaagttggctgcctcagcggggctgtgctcagctccattttctgcctcctcagccctatgagattgctgaaaactccaaggaattctcttcctctcagcagcgaccttctttctgacttctcagattctccttcaacactaagaattagcaaatcccggcgagggtgactggagtgacaggcggaaggttaggctcccctcaatgagcctctctttttgatgtagtttaagttttgacatctttggcagctctcctttgctttcaagcaaattgcttttattgtgtatttctagtggttctcagcaggcaagtgggtctcttgtaggctactccgtcatgtcaagaagcgcaaattcctgagagggctcatttagataagtttatggtgttttgttgttgttgtttttgttgttagtatttttagtcagacatctttttatccagtggaaattttgcgacttacatacctcaaaaaaataaatgaataaatcaataaaaacagttctgactgaactgaaataacaagcttggaggtctacttcctacaattccctcacttaatgcctcttctccccattaagcacaaccttccaatccttcccagggcgcctttgatctctgtttgaaaacctctgatgaatctctacatttccattaatcacataagaatcattcataaatatgtgaaataatcaatctatgaatcagtgatgatggttttagtccttcaacatttttcttgagtttaatgatagtatattcagtttgctatctattttatgggttttttttcccttgtatttgtgtgccattttttccaagtttgacattcataaaaatagagtctatgaagtgattgggcccttttacaacctacagaacttgagaaccttagaaaagtcctcagcaaggacagttttagtatatataaaatattagtaaaatgttcataggaaaaataatatgggttctcataattgctttaacaagtgaaattttgagaagcttttgttgttgttgttgttgttttctccacaatatttaaaacatttaataaaatttggggaaacttccactggggtgtgttgattagaatttaacaggtcaactatgatgtaaagtcactataggaagtatcatctgtagaactagataaaataattattagtaatttcctctcatcttcagaatcatgcccttctaaagattagctaaggacttcagggtggggccgaccctgagggtatgccgagctgatccagaaacacctgtggtacctcacgtctaagccttctggagaaatggaatacaaattatggcaactcagcagcaaagcagttcggtcagggctggggtggagtgggtgtaatttgggtacaaaatatgcatcgccacaatgaaaataaaagctaatcttgaaaatgagatgcaagatcaacatagctattttgggcctctgaacttgttttattccttccattgcttgcctgctcagtcaacctgcctgctttcccttctcctcccatctctaccatgcacacctgagtgcaagccacacattctattgtgcaggcaactgcagtggcctccccacaggcctcttttatctgcctggccctctacagtcccttctgcacagagcagtcagagtgaatttctaataatgcaaataaaatcatataatttccctgcctgaggccattcagagacttcctcttcttatcaggttaaagaccaacattgtaaagaagcttacgtggctttcaggatttgaccttctcttcagtcttcaggctcaccgtcctgtcccctccttcctccaccacccccaacaaggaatcagccacacttgccatcttttgcttgttaaatgtgtcatactccctcccatcctagacctatgcttgtgttgtttgtttcctgatgcattccccactctatcctttcctctagtttctaggcattgttcagctttcagcctgaatatcatggccccaggtgggatcagttccttacgtctttcacttcatgacatcccttttactttaggattgtaaccattcagctctacaactgtatgctagttcttctgcttagtttaccaattcctttaggaaagagatcaggtctaattgaatcctaactacaacccagctcctagccaagcacctagcatatagcaggtattcaagaaagagatggtgcttaaaagagaataaaataataaatgtagccagtgatgttgccagcttttgggcccctgagggaatatatttctatagcacagttgtaggatcctaaaggtcaccttggagatcagcagtaaagaggcattgtacttttttaattgtctaatttattaccaagaagaaatttcaaatctgtgaagaactaatgtgaagaaatactatttgtaccaagtagaaaacacctgctgtttgctacgaggctccctgagttgaattaactctctcaagaggctcccaaagttgtgtccctaactccactatcattcctttcctgtcctctgcctgacaagcatgctttgggttctcatcctcagctagtggatgtgagagagggagctggctctatctgacaaagtaaagtacagcactgaagccatagcaatgatgagttagacaagggaatctcaattctttgcttcatcttcttgacttagttactcctgatagcagtgccccatgaaggatgagaagctgtatctactggaaattcagggcttggaagtcagagtcaaaccctaatactcagaatcactaatgtgatcatccatcagttcagcaccagagtgccttcctttcacccttgagtaaattgctcttctcaattaatccttccccttgcacaatgctgcattcagcaatatttcctgagaggcccatgtgctgatgctggtctagttgctggcaacataaccatgaacaaatcagaggaagttcctgctctcatgggacatgcattctcttgggaaagataagaaagggagaggtaagtgtatactatgtaaggcagaactatgtgctgtagcacaaaattaaacagagtaggatgataaagaatgaaggaggagggcatgtgaggtcgggaaagtcttcccttctaagatgactattaaatggagatgtgaagggagtggaagaacattccagactgtgaaaaaaacaagtccaaagaccccagggcagcagtgtgctttgcaagtttggtagaaaacaaagagaccagtgtgactggagccgagaatgagaggaaaaattacagagattaaattgagagctgggtataaagattttgtagtttactcagatattgagttcattggaaggttttgaacaaaggcatgacataatctgacttccatttttaaaagttcacagtgctgcttgatggaaaatatagagtaataaaaagcaaagaaagaagaatatgtccaatgatattgcaatagtccagcaagtgattagtactatgactagaagagaggcaaggtcagtgggaagatgcggctcaattttcctgtattttgaaggttgagctgagatattggatgttgggatgtgtgagacagagaagagtctgggatgaatccatattttgataagctgcagtgacataatcagttgaaactttaataaaacatagcctacaatcccagactgtttctcagttggctctggcttcagttgtctgatagatgtggtcctaaaacccctacacaaatgtcctgggtttaaataaatgtaagagttttgtatgttccagggccttgtttcaaaccatgaactaaaaagaaaatctagaaaaattgcatcaacaactatattgatgatgatcatgccactgcacttcagcctgggtgacagagtgagacgctatctcaaaaacaaaacaaaacaacaacaaaaaactacattgatggaattggacctccatgcatttttttaagacaaacccaatattttcatacccctttttctccttgctgccttcctcaatacagctaataatatttgaactacaactgagttactgaagtttctctaatcaattgagccatagcaattctgtaaataataatactctataagagctattttgttcagctcacttatgttaaacttacagtaaattttgtcatttaagaagtatatattccagtactattctcctccgtaatttaagaattccccaattcttaaaccctaccatattttgtaaggttttctataatacacaataaagcattgcagaaaagttcaaggcccccccttagactcttaataactatttagatataaagctagggttttaaaattaactatttataaccttatttaatgcttctgacaaccttatgaagtagccattattttttacttcaaattacagatgagaaacctgaggttttaagaagtttaataattgacccaatgtcacatagctagaaagaggcagaatccatgcataagcccgagtatcccagactccagagaccacattcttagccactgtgccacactgcccccaggctcttattcaaggtatctgtacagcctaaagtctgatccttcatgtaattatttagtacagtttctgtccccaaagtaattgtttaaaaatgttagctgctgatgttggcgtaattgtataggcattaaatttcatatctctgaaatcacattttagagaacagctttattttactgcacataccctgaaagtaatacatattactgcagaagaattcttatatactagtggaacagatcatgcaaactgctttcaggtactgatattgggcagtgaactaagctcacccaccagcttcacgagtcttcacctgcacagtttgcatcgttcatatctgttcaaattactaaatgccgcagactttcaagcttgcttgcaagttggtggagtccaaggacatttagtatttttatgtcaaaggtctgttgcagtgcttgaattaactatgcacataatgtaaatactaccaggtaacatttcaatatttataccataggcaaactataaagcgtagagccatgattatgaaatcaatttttttcatatgtaagagaaaccaactattagtttccatgaaaaccttccaatggactcaaatatctaaataaaatacaaaatctttatacccagccctcaattttgtctctgtaatttttcactgacatttagataaaaactaaccataccgtatgtaaacctccaaattatattccaataggtgaattaagtacccttacaaagaaatatccagaaaatagagggcaattaactatgttgtccctacctaaggaggagaaagagaatcaacacttagcttgttccctatgctagataccatggtaatgttcacacattatctcttctaatcctctaaggaagtgctttaatagttaatatcataattttgcagatgagaaacctgaggctcaaggaaactaaaagtagcctgaccaaagtcactagatgatggatgagtgacagaaccaaatgaattcaagttccctggggtccatgttctttctcctgttccatatgcttgctctacctgtatagattcatatttataaatattaaccttgtacattccttacctgcctaccctcaccataataaaatcataagccagcatactggtaatattgcttagtatactctccaaagttgaggaagagtggtgtgatggattagaaagattcccaggaaactggcatctggactttaatagtagtgttgccacattagacattagaaggttacatttcatgttgcttctgcagacaggtagaaaatatttggtcttttgttatactaattagttttggtgtttcatcatctaagtagggagtgtctattctctgcatgtatgtatatacatatatatgtatgttttctcttgtattttgtgttttctgcaactgttgaaaggtgtgtatatattatgcagctacctcagaaaagttataaccttatattgttaagatcagacaccttcaatgcaaaaataaaaaagtcacccccagtaaaaatgatgtggtatgtaagagcaagaagtgttttaattgcccaggaaaaaaattcttcgatgttagaagttcaatttcttctaactctgagggatttttaatgtcacaaagccttctagccagcctgaagccatagttggagagggattgtgtattgggacattgctttttagaaccaaaaatgagttttcaggtttctttgactccgttagttttagaaggaggtggagttcaacttcacaaagcctgcccaaggctcagtgggtatgtactttcaacccttaccttaacagacaacattgggtcctttggacctgatgactggagtttctttgatgtgtaatgatttacccctactgctgtgtgtgtggacagatcactttaatcctctgaccctcagattttgcatctggcttgtcactatttaggtgccgcctatctttgatattttacaattctcaggacctttcccaatttcagattctaggaaaagggaagacatgttctagggtgcatttgtggttgaatcttgaatttgtgggttacaaggaaaacatgtcattacagtggtttcccaggtggcctcacactcaggtgaacaaggaactgaagcttggagtacagctggtagttgagctgttctaaatcgtgaactgatcggcaatatggaacccatcactccttattgtactcccataacttaggtctgtgactgatccgatgtctgaaacacaggtttgaataactcttaatcagcttggtcattatgtaagtagaagccaaagagggaatataggtctgtgcctgtcacataccaaaacctacaccttagctaaatgacattctgttattaactgagaccatcggtttataaaaattaaaagcttcaactttttggttttttttttctttttctttttctgtaggcacattagtgcctgttggtaaaagccagtaattgtgagtggccacagtgcccagggttggcaggtggtgtggcattctttttattttttagttttaataatatatttaacacagtataaccaaaatattacttcaacatgaaattaatataaaaattactagatattttacattcttttttcacactcaatctttaaattctagagtgtattttttgcttacagtacaccaggcccttgaataacatcgttttgcttattagcacatccttttccagtctccagaaacattctctgtccctcaaagccactccagtatgtgcgagtatgtgtgttagacacatacacatgttctttgatctaaagaacagatttttttaatcatatgtaaaatacaacatgagcatcttttggggaaaaaattgatgttttaattgaccttaatgtaaaaatctaagtaaatactgtttgtaatacaaatgcaccttttgaaaatttccccactaccacttcccaccagattgctgcctttggctgctcctatttagacattctggagctgccacaaagtgtgaatatcacacatccaaggtgcctgggaattgagtcaatattttcacataataccggtggccaccaaaatatagttacttacttagactgacagattgttattttttctcttaaaacaataggaccctcattatttatcttttctaaaccttttcttggaagatcaaaagaacaaacctgcccttccaaatctgtaaagtatcccaaccaaatgattctcttaccaagttgataggaggggaatccaagacacatgagctctatcaccttcccttacccacacacattttcttattattttattacttaattttttttttgaaaagagtggtttataacttaattttagaatacaaggtagttggatggtaaagcctgtaatgtatctttaaaaatggatttcaggctgcctgtatgagaaaaggtgctcagcttttctgtaaaatgtcatgacagtttctgcacagagactggagacttggagaatgttaacggcagtggggcagtagagtactttatggatcaatagttttgcaaactaaaaatagcctgtgatgggacctatcccaacacaacactcagctaaagaggctgttttcatccccacaatcaagtatctcaaaaagtcaagtcttttcaagtaggtgacttcaagtatctctgttacgtagagcttaaaaaaacctaatttgcaatttacatccaaattggcacacttttcctgtgcctattctgtaaacaccatgccagccaggtgtttgtgtccatcctggctggccaacgtcttagcctcatccccgtctggggaaggggctcaggtgggaaccccgccatctcagtgaccactgtggagggtgaatcatacccctccaggtaaggttcacagctgaaaaagccaaagccaaacacacaaataatggggcaataaggaattaaagcgggccccattcttgcagaggacacggggaatacagctagatacagtgcaggaggagagattcaggctgtcgccgcagggtcaaaagttcagacaagcagaacaaggaagactggagagttcatatgttggaggaaagtgggaaaagaaagggaaagcagggaacctggttgcctctgctcacagctcttcctgatgcagctctaattcataagttaaactcttgtttttctgcccttgaattttgccttgaggaccattttcctctctcactgacttcacagactctgtctgacctttcttatttctccccatggtcctcctgtcaccagaaacctttcaaacggttattctatatgcttgtagattctagtgccttgctacaaatataggttatattattgaccattatttctcctgatagttttcaggggaaaaactgctgatgtccaatgaattctcttggtttgatttttgcctggaaatttgagagtaacaattacttttctcaagatgaaaacaattcaacctttgtcccaattgcttaactagaattgtggaagaaaggcttttgctcaaatactgttaataaatgactgcctcagaattctgaagagtttctcacggtcaaaaaatactaatgacatgtgtgcaagtgattttcttgcctgatagagtccaagtgtacatccacaacgaaaagcatcaaagctaatatttctttagcctatcttggagaactttagcgtgaaatgacaatttccatgacaagttgtcttagaaatgaagagaggttttcattttcatgtagttgctcataattttctacttatcgcttctacaacaactttcaaagcagtgaatgttctgttttgttcaaaaacatgtataattttgcagaaacttaatgtacttgtagctattctggtggtgtacttttaattgcttttcattctggaaaactatgcttgatgatcatgacttcgaaggagctgatgatcgctacttcgattgttgtcattgttgtctgtctttctttctgtgtctctttttttttttttttttttttttgagccagggtttcaccctgtcactcaggctaacatacagtggtgtggcatgatcatggctcactgcagcattgaccttctgggctcaggtgatcccttctgggtagctgggactgcatggctaatttgttgtgttttttgtagagacagggttttgccatgatgcctaggctggtctggaactcctggggtcaagtgatctgcccaccttagcctcccaaagtgttagaatactaacactcatttaaaaaattaagcaggagatcactaggcagagaattgggaaagaaattcctggctcaatgtattgcaggagttaaggctcacaggtagcaagtgtgcaatatgtcagggcactatggagagatgctaactggcccggcctcatttcctctactttgaatgagttttttttccttgggtagagattatggaaatcaaagtacttaaggagtaaaataagattattgtgtatcagggtttctcaacctcctcactactgacattttagtcctgataattctttgttgtgaagggttgtcttgtgtgttataggatgtttagtagcatctctggcctctacccactagaagccaggagcacttccctctaattgcaacaaccaaaaatgatccagatatttcctgggggacaaaatcatccctggttgagaatcacttctctataatctttaaataaatatgcatatgcacactcagtgccctatacctacatcagttcatttggaacacacattatttgatatgaatgcagtcagcagataacacaagaaataggtgaaggtttgtttcttaactgaatttatctctgaaattaccattactcaaaattctcaacagtttctctccccacagtaatttggtaaaaacctcttgtcacaattttttttttctctgtgatcttactgctgcttataatctcactatttaaaaagatgccctagtattctgaaactacttccagaaggggacattttactgttgttcaaatagtaatacctaattaggattctcccactgatttctttttaactaaggcagctagcttaaaataagcctctaatgaaagaggacaggaacaggtaggtagagaatatgctggagaagatgtgtataaagaagacactggaagatggcaaggcccattccattcatatcacccataaagttgaggaccagttattaaatgcaaccacagagcggacatagttcatactccataagcgcttaatagctgagggttaaattcttgttggaattctctggataggcctatgatcaatctacctttagttttactttccattaatcccttttaagaaaggaaaataaatctttcatacagttagcatctttccatagtgccctgacatattgcacacttgctacctctgagccttaactcctgcaatacattgagccaggaatttctctcccaattctctgcctagtgatctcctgcttaattttttaaatgaaaagatagtaagaatgcaggatatttctaagcagttactggaaaccatgtgctgtagtaaataagccccatccaaagtgaggacaatatacagaggcaggaagatcatgtttatccctagagtcacggtcatcgacattagtggcttcgctcccaacctctgaaggcaggtcagtgtttgcagatgagtgtgttcaagtatatcaagggacagacactgctacccagggcatgagcatgctggttacagaaagcaaaaggtctcattgttctatgtgtgcccccaggcagcattggtcttacctgggagcttgttggaaatatagactcttgggtctgcattttaacaggattcacaggtcatttctgtaatgttcaagtttgtgaagctctggcataagaaacattttccagaatatcttctcatgagatgctctggggggtggtgggggaaacaacaacgggggtttggggaagcatgggttcaaatacatatatatgtgggaatctcctcatgctacagccgctgctatggtctcaatgtttgtgaccctctgttttggtctattcatggtgctggaacaaaataccttagactgggcaatttataaacagaagaaacttattgctcacagttccagaggctgggaggtccaagatcgaggcaccagcagatttagtgtctggtgagggcttgctctctgcttcaaagatggaggcttcttgctgtctcctcatatgatggaagaggcaaacaagctctgtcagtcctcttttataagcgcaccaatcccattcacaaggactccaccttcaggacctcctcgcctcccaaagacctcacctcttaatacctccactttgaggattggatttcaatatgtaaattttggagagaaaaacagtcagacaatagcactcctcaaaattcttatgttgaaacctaattcccagagtgatagtattaagaggtggggcttttaggaagtgactgggtaatgagggcttcatcctcataaatgatattaatgcccttataaaagaggctgccttgtctcttaggcaccttctgtgaggacacttagaaggcaccatctatgaggaaaaggccctcactgggcactgaatctgctggtcccttgatcttggactttgcagcctgtggaactgtgagccataaatttctgtcgttgataaattacccaggctaagatattttgctatagctgcctgaacacactaagacagccactttttggagattcgcaacgtacttagtcactgagaaacatactttaggaaattccagtttataagatcaggccttagggatgggggaggcttgaattctagacatttctaagtaaaatttggttatggaaaacaagggtttaacatgataaaagtgaaaggtgattactttggatcaactttattattttttaatgtcaaaaaatggatacattgtcatatgtcatggtagtcagcttgctaaataccattagcttccaagtgatcctgtcaaaggcaatccagaaatgcataattactattgagtcaatgcttatttaccgagtctaattatttattttgttggcagttattgttctttctggcattagttctaaagctatttggtaaaatatggacagttctaaagtataggtacagtattcatttgctagagctgccattaaaacataccacacactgaccgggtgcagtggctttcgcctgtaatcccggcactttgggaggccaagacaggcagatcacctgaggtcaggagttcgagaccagcctgaccaacttggtaaaatcccttctctacgaaaaatacaaaaattagctgggcatagtggtgggtgccttaatcccagctacttgggaggctgaggcaggagaatctcttgaacctgggaggcagaagttgcagtcagccgagactgggctgcattgcagccattgcactccagactgggcaacaagagcaaaactctgtctcaaacaaacaaacaaacaaacaaaacaacacacactgagtggcttaaacaacagaagttgattttctcatggctctggaaacaagggatccaagaccaaagtgtcagcaagtttggtttctcctgaggcctctcttggcttacagatgccatctcacggcgccctcgcatggtctttcctctatgctcgcacatccctagagtctcctcctgcgtccagtttttcttttataaggacacaaatcagattggattagggcccatcctcatagctcctttgaacttaatcacctgtttaaagaccctatctcctaatacaattatggagttagggcttcaacatatgaattctgggagaacacaatttcacccataacgatgccaaatgtttttttttttccgtttgtttgttagtttttttgttttgttttgttttgtttttgagagaagggaagcagaaatactttcatttgttttgaaggctttacatttaatttttactcattatttatgccaattattgcacaccccagagatgaattttatgatggtctaggtcatcactaattattttgtttctgatacagattctttcaccttatttaaaaatatcttcaaacttttcaattgtattacataaaataaacctgacttcatcagggagttccttgaactctagagtctggtccaggctgttgcagtgagtcgagatccaactagtgatactcctcattccatctgttcctttaggtagtggatgcagagttgtgcaaggttttccctctgctgtgatttattcaccaaagtctatagcattcccctccaggatgtgaaaaatcacaggagaccttgtttgctaaaagggctcatagagaatgaaggatgagtattacatcgaccactcctttttatgctctgtctgagaaatttcatttcctagcctgagcagctgccattctctgaagcagcctgttgccactgctgctgagggaatagctatttttaaaatccctttctctttttgataataaaatattcactgaaaattatatgagtaaataaagtaggagtgggaagtgaggacaataatgatattgaatatatcacgtaattatgagctagactttccccagtctaaataattttttgactactttcgggtcttttgcctgctgcatcaactacagccaggtcatctattacatacagcaatttaccctgtcgacaaagaccgtcgggaaaaattcatcatcaatttatttctcacttcccctgctgcattttaatgttaggatatttgcaaaaaagttggcggttatatgaataaatgaagcattggttatagctgcacttgacaataacatctagtgtttataaggtttttttgttttgttttgtttttgagacagagtctcactctgtctcccaggctgcaggctggagtgcagtggcgtgatctcagctcactgcaacctctgcctcctgggttcaagcaattctcctgtctcagcctcctgagtagctgggattacaggcgcaaaccaccacacctggctaatttttgtatttttttagtagagaagaggttttgccacgttggccgggctggtcttgaattcctggcctcagggaatctgcctgccttggcctcccgaaatgctgggattacaggcatgagccaccacgccaggccttatcttataaggtatttttatacgtttgtattgtatggttttatattatttgaaaacactttcctcaatatatacttggtccttggaacacctcagtgaggaagctaaggcaagtttcttttctaagaaatgtgacattagcagttggtaacagacatgagtctagagtccaaattaactgagcatctactatgtgccaatagtattctgaatatgtgagatgtgtcaatgaacaaaacagagatctctactcttggggagcttaattctaattatagaaggcagataataaacaatagacaaaataaatatataacttatgtaatagaagatgacaagtgctatggaaacaggaaaagtagagcagtaagggaggctgacatatagggtcacagttttaagtagggtggtcagaagaggttatattgagaaagtagcatttaagcaaagtctggaaaggattgattttggtgtttagtaatttgctcactgtctctctgccacctgtttattggttatagcataatcacccaaaagacctgcaagtatttgctcagaaatcttaacaaccatggggtgattagaaagaacaatggacattggcctggacttctaaaaaaaaatgacaatgtgaactaggagtagtctaccttgagtcttggtaagcagaaaattgcaatacctttttaggacaaatgagttccacagttttaagaaaatcttagaattaaataagtaaatggtgtttctgctgagttcttggctatcatgggctaatcagtatgccttctaagatgcccatctgcatatttgggcataggactgctcacacattgagacgaagttagacttctgtttgtccctaagaatgttccttacaggctttgttatagatcattgcagatccagctccttactggataaagttgatgaaggataaagaaggaagatagaactttatagggagaatcaggtgttcagttgagcagtgaaaaaaaggcattacgggaatttgtgatctaaatgctatgaaagcatatttgacatctcttagggggattctttatcctgtgacataaaattccaccccatgatctgaaattattccaagtaagtggggcagaatagactaagtaatcttgtaatagacaaccctgaccctcaatggcttaagatagcatagacttaatttttcttcataactttccattgagagtcccagggttacttggaagcaccggtttctctccaccatcctctctgcaagactgatgaagcggccactatctggaatatgccagtatttgtggctgaggcaaacaatgtggccaaacatgcactagcttctaaagctttcattggaaaatggcacatgcttcccctaacatccatggactaaagaaagtttacctggatagaattacgttcaagtacttgtggaagtaaatcctacatggtgggtggaaggagaaagagccaggatatttgtgaactgtgtagggattcacgcagtgggtaaaattttgaggtttctgtctaccctgagacttcaaaaaaaattattggtgaagttgctttttgctatttgatgaggtgtccttttgctgttcagactggatatttgattcctcttgtgtagttcttcatttttcaggaaggagtagggcaggaccaatttgtgcaacgatttgaagttgaagagatgcagtttaaggtcaacatatgacagttttgttgttagttttgttgacagtatactcaatatccttttataatgaagtcatttttctcagaagctcatgttgggttgcaaaaaaatatataaaagcagccttatcttccacagaggaaattttaaaaattataattcttataccacaggcaacaccattgttttttgatctccgtgacttctgttttgcaactccaagatattaggttctatagcttctgagaagagctcatgagtgtagaaaggtctgaaaatataatatgttaggcaagcaatgtgtttagtaaagaaatggagacagaatggggaggccaaggagatgtcaaaggtcacacaagaaataagttgagcccaaagattaggtaaaataggagaggtcatgatgttctcgaaggcctgattcagaagaggcaagaggtggggaactcagtcagtagcactgaggagcaagacatgccgaggtgagccattttcctaggtcaaaaggcagaagccagaacaaaagggagacaccagtctttcaggcagtcctccatgggcaggtggcactatccttcttctgcatctttctgcacttgcagaggactggctctaagaggactagtagcctgcaaaataagtttgtatattcttgtaacaggttcacacatatgacaactcctcatttatttttctatatcagcaggtcttcacatgggccatccttgtgattctcctccactgattagcccatatctcaagctcagcctttctaagtgattcccctttaggccacccttttgaggcagtatggtgatgtggtcagtgggcattcatgagtctattctcaaagctcccagttaattgatgtgttctgctccagggttgcccagaaggcaggagcaatagaccagtgtcttcttagttgtattgcccagccatctggaccttctagagaattcactgccaggaacgcaggaccatagtctaaaaactgattactccaaaccagccatgagccacttagcaagtgctcacatctcatgccctttcaacacacatgcagtgacccccatcctcagtggaacctggctccatcttgcttttgttccttaatacacgcaccacttctgtttccaaggagctaccatgccttcccaatgccatggcttgagcaagaggatgatccactgggtgatagaattttaggccattaatataccgtctctgtcttttttacccctctctgtttcctgtatgttaaatggagatactaataccttcccctcttctggaagacaagagaataattgaatgaatttaaatatttaaaccacttcccctgccaaacaaaacaccagaatgagcagcctcagagaaagccctagactaaggctcccatcattgttgccatcatcctcgtcttcttttctcttattaattaatctccagacagctcagagcagaaaacaaagggaccttagctctgactggagtcaagaattttcctttctgtttctcccatgcatctcctaaatacccaccagagtctagcagtgagaggggcctgcaataaggaactgaagctcatgctttttccttcacctttttaaaccttcctttaggatctgcaattggtggaaagatgaatttgtaggcctgaggtattaacaaccaaactgaataaaggcagccttcctgtggaaccaaagttcacttaatcgtgccttgggcctgggtgaacacaaatgctgttctttagcattgactcagggaagcatcgcttgcttttataagattgtaagacaatgatggaagtaaaacagctcttcttcaccccacttaggtaggccagctttagaatggagaacaaggtgtgattttcaacccataatagtattaattcaaactgacacagcaaggaaatccatttttcaggctgctatttatttcttttctcttatcagtcaatcgcaaatatttattgagcactgtctatgagctcagcattgaaggggaaacagaataagcacaagagatgacctctgcttttaccatttaacatttccttgggggagacaaagctaacattcatggcctaatagaaagaacacttaactggaatcaggagatctgtggtcttgtcacagtcggttgagtagtatagtgtgtggttaagtgtagaatgccctggaattgggctctcagagctataaaataaggcactgtcgttaattagcagtgaaaccttgagagaatcctatacctctcatcaatttttctcatctgtataaaagaagttaataatagtgcccaactcaaacgcttgtcaagagcttaaagttaaaacttggctagcattatatttacgacacattaagtatgagatatcattcatttaatatttcagacaagcctttgaaaatctctgggacagaaaagagaccagacttgtgttatatatttcctgtgccctagagaccaaatggggcacatcacatatgcatttttatacatccccactaatgccttgtaaagtgggttagggagacatgaataggttaaaatcatgacatgaataggttaaaattttgtaaggtctgctatttggtaagagacaaagcttagttcaaactctgatctgagtcaaaatcctgtgcactttctactctcccatagcctctctgaatgtcagttttccctgtgagaaaatattgggatagatcaaatgggctctgagttcagctctaaatttttggattccacgtcatccaatcttctagtaaaactgaattttagatcaagggcaataaggatgggagcactgcattcacaagaggcttttagaagtattaattaggccatgaagaaccagtagaatttgtttatatgaaaggagactacttctgctaggcataaatattagaacaatggtgggaatgataggtagggaagacaatataaaaaattatccctaccaagaggaggctgctactgaggaaaggttggagagaggactgttttccttcctaataccttaatctgcagtttctcaatatcagcaccattgacattttaggccagataaccctttctcctggggactgtcctatgaattgtgggatgttgatagggctgaattgtaccccgctcccatctaattcatatgttgaagttttagcccccagcatgatcatacatggagatagagcctttgggagataataaggtttagatgaggtcatgagggtggggcacctatgatgtgattagcgtccttataggaagagacaggagagagtttattttctctctaccttgtgaggacatagcaagaagactgccatggaaatgattgagaggaccctcaccagaacccaaccatgcttgcaccctggacctccagcctctagaactgggagaaaataaagttctgttgtttaagccacccagactgtagtatgacacttgttatggcagcccaagcaggctaagctgtttagcagcatccctggcctctcctcactagataccagtagcatccacccagttatgacaaccaaaaatatatccacacgttgcccagtgcccctggggataaatcacctcaagttctcttaagttcacaatttgagaagatcacttgggaaccactgtcttaaccttgtcttaattctaatttaggccatgaacctcattatctgcaagtttaggttttatgtttgtctctttgtgtttttttgtttgtttgtttgtttttaatttttatttatttatttatttttttgagacagagtgctgtcctgtcatccgggctggagtgcagtggcccaatcatagctcactgcagcctcgacctcccaggctcaagcgattttcccacctcagcctcccgagtggctgggactctaggtgtgcaccaccatgcctggctaagttttgtattttttgtagtgatggggtttttccgtgttgtccaggctggtctctaactcctgagctcaagtgatccaccaccttattccctcaaaatgctgacattacaggtgtgtgccactgtgctcggccccgttatttgcaagcttaatattgctgctttaaatttatgtttgcctaatatggttctcaaactttcctgtgtataagagtcaccaaggggaacatagtaaaatgcagatatttagtcttctgtccaccaaaaacttggtgtagtggtctgcattagaaccaacaaatttgatttttaacaagctcctaactctggtgattctgacacagtctagggacccctactttgagaagcactgacattgttgctatagtcagtgtcaaccttgaccttacatgcatagtagaaagacagtggccttgggaacaaataattgtggatttaatcctttattttttatttacttgggattatgaagtgagctggctaagcatgtagccgtcaagatcaggtgccctagtttcaaagcctggcttcgtctcttataggatgtgtagcattgggtgaatcactcagcatttctatgcctgggcttccttacctgtaaaatggggagtattgtcagtgcctgcctcatacattggcattatgtatgactggatacatggcaagactctggtaattgttcctgcataatgtgttcaataaatgtatggtggtagaggcaaaggttaattaaaaataagtgtggactgttgccatagcagccttgtaagggcattcttgactctgttaagaattcttaatgcacttagcacaggatttttctgactccagagctcctatgagtgacttgggaagtttgtagaatgcatgttcccagcttcctccactcaagagagactaattcattatgccccaggtaaggtttaggcttgcatgtttataaagctatccagatgagtatgatgcaaccaactcagataccacacatagaaacacactatcttgaagaaaatagattgtgttatgtgcacactcgacctgcttattacattgatctattcaagtgatagactatatgctagaatataatcttttaagtctgttctccactgaatatcccacatagaggtgattacaaaacatcgcatgaattccttgttttcatatttgatacttaagcattctctttagcttctagttttctttgatatccttggaagctttccaaattgtgttctggaaaaaaaaatcatgtaaggcttttttaaaaagggaggaagaagacacttcagaaaggatgtcacccagacttaaaacccttttcaacaggacgtttcaacaagttgggttgtgaacttgagaaaattaatttttggaaattcttaaagcagtacagactcctattaaggaaaaaatctagtagtgtagaaaactaaaggcctgtcagtataaattttcatttcatctttattcctattttttggtgaaaataaaattttttcagcagaaaataattttctccttagggtttttttgaggaaaaagatggattttgcttgttaaaaaaagaaggcaaatgtattctgattgcaccaacatttcttaacgtgcactccaaactctccagcttttttccccataaatttgatgagaattatgaccaccatgaatatgttcactatcaaaatcaaagacattgccaaaaataggtagaacttaagtgttacttcagttaaatggtgatcttatcactgtgcttggtgtcatttttattgtaacatagtggaatattttagaagggaatgattagtagtccagattttcttctgcaagagctagagattctctgatgtagtttttctgctgtagtacatttttttccaatgccttcaatctattacttttaccattgcaaatcttttgggtaatatgtgtaatgggcgtacatttggtccatgaaactcaggagcaagaatatcacttgtttttatatttataaggtatataattatagctggccactttccaaaagatctggcgtcttatggaagtctagaagcaagcttcttggtatggggttgttgtgttatttctcttactctaggcctgtgtgtgagcagccactccattcatacaaaattgtgcataggttataacagaatgtcctgtatgcacagatgctctgatacttcctgctgcaagaggagaatgtttattaagcctagtgggggaaaagctcctagtggaattattcctcctttccttcctcttatcttgggaaatcccactgttcttccccagtcaggcccttcccttcatccttctcccacgctgggataacttccgtttaataatcccttgatgtacccaacctttcaaacaaacacatgggtgggaattttctttagttcacccttagaaatccaaatgtgctgttaacttatgtggaaggtgggagggtggagggcatatttagggatgaagatgaggtatggctgagaaagaacgcagaagcttgctcattcttccaaggagagggccagggtgaaactaatcttttcatccttacctttttgaaagaagaactagacagatagcaatgtaacaatagaatgttctcccgaatatttgtggtaaagtctccgataactaaactcaacaaatcagagcctttattactgcacttagttctggaaggagtccaattacaacaaagtaactggtatcagattcttgctttaataacacctttccaggaaggccctgggctcttttctaatttggcccaatcactgacgccttctccatctttgtcctcagatcctttgtgaaatcccagattgtcttcacttactaaagaaagacaaccatttcattcagcagcctggatttactaagcaagggaggagtgggtattttagggtgatgcttagcaataagggtgaatttaatatgttctccgtttcactcttagcgacaatctcaaaatcttcaaatagttcaaaaaaattaaactgtttttgtttctgaggagcattcagcaaaattgaaaagtcagtaggatttactttgattcctttgtttcgcctagcctgtgtgtttctgaatcctgactacacattagcattacctgaggaacttcaaaaactccaagcctgggtctcacccctagagatgctcattcagtctgggctggggcctgggtgtcactaatttgaagtcctccaggtgatactaatgtacagccagggctcagaacaccagctgcactatttgcataagtctcctttcttgttagcatttatttatttatttataccctgaatatcttaggactgattttttacagggttatgctcttagtaggcaaggagctgataaaatatcatgtatcccaggagcctgtatgttagcagggtcttcagaaaacctggaacctaaataataatggtgaaatggtggcttgacagggcagcgatattgccttcatttccccagctctccttcctttcctcctttttctctatcttttcctccattaatttgaaaggcaattcttaaggcattcacactcaaatttctgccatatatttggttagctacctgtagagctgatgctaggggtcatgctttctaaggcatagtcctatgtatcccgacattgatgatatgggtttgtacacgtagtctgaaatgtttgattagctacccacaatcagtagcagcctgcttaagatatcagaagaccaagaagcaaaaataggccaggtgcagtggtttaggcctgtaatcctaggactctgagaggccgaggcaggaggatcagttgagcccaagagtttgaggttgtagtgagctatgatcaatcatgccactgcactccagcctggatgacagagcaagaccctggtctctaaaattaaataaataaataaataaataaataaataaataaatacactaaataaaatacacttcttggtctattttgttattgtagcagtaatatctgttcattgcaaaaacattagaaaatgtagataagttagaaagaacaaaccaaaaaccacctgtaatatagctagggttgcctctggctttccttgtgtctccttctctgttttcaaataactttctatacttaaaatgatttttaatggatcctcctcttggtacatgttaaaacagagcctctgactacatgttctgtaaggcaggaacatttaagattttaagccaacttagtacctttgaattcaaaacttgtagtttcttagaactccatacattagaatggctgtggaattatccagtgatcaataaggatgtgagtttcagaaagcttaacacagaactaatcagtgacagaactataaatacaaaatccagggtcactaggttctgggggccatgtgcctttctgtagctcacactatgtgcttggtgtgtagccaagtacaagggtgtcagtttaatctgggtctgcaagtggtaaattatgctttttaaagtatttactgttgttctacacagtagaatgagaaatgagagttgactatattcttgacatgatctgtgaaataacgtgattgtggttgaatttcctggaaaatttgaagaataaattgattattcaaggtgtgcattggtttatacatatctcctcttctcttaatgcaaagctatgatgttaggaatgtccaaagaaattagtcacagaaacaataatatttaacccaacatgtcacaaaccttgatttacagaacactagttcttaagatgttaatagatattccatagaaaactctggattaagtcaaattaaagaaacatttttcataattataggagtatcctgggtctacaataagcttatgggcattgtaaatccctgtatgagacaaagtatgcaaatttccttgttgtaaccataatagctttttttttttcctttttaaaggaccatttattacatcttgaacaactagtatggttgttcagccagtttagaacatgctggttttatctggttaggctttgtgttttgggaacatccagagaacatcttctaaaggacaaagatgtgctgagagcataaagttaacctgttgtaatttaacccagggaacaaaagtggatttgtcatttcttctcaaggaattcttgtagtaattacccttgtctggagttgcttaccttacccctccaagtctatcttttttcttgtgttagtgtctcttctgaaagtcctaactttaaaaaagcagaatatgatacctccttttttacaaaaccaaaggagggacattcagatgcttccttgaatctccagtttccaagctagacagtcttaaaagattttcagaggtgtccaaagtaatcaaagtcttcttctaagagcacttgttgatggcagaactgtattagtctatggtttatggtgattaaaatttgatatagtgcaggcaaatcaatagaatcacagggttggatggtaattttcagcagtggaacttgagaggaacaattctatttctatttcatagtctttttgtctgtttgtcttaaccaagtcttcattaataacctcctgaccattaaggtgtcattgtttaaaaaaaaaaagtacttttccctgtctcattttggaagaaatatatacatacacttacctttctctgaaaatatctggtgcattatcctttgtgtggccttctccccctcccatgtgattttgtgccacggtgtgtaggtgattaagagtcatgtcttataatactgactgatacggtttggctgtgtccccacccaaatctcattttgaattgtatttcccataatccccatgtctcctgggaaggacccactgggaggttattgaatcatgagggcagttaccctcatgccattctcatgatagtgagtgagttttcatgagatctgatggttttataaggagcttttccccctttgcttggcacttctcctttttgccaccatgtgaagaagggcatatttgtttccccttctgccatgatggtaagtttcctgaggcctccccagccctgtggaactgtaagtcaattaaacctttataaattacctaatctcaaggagttctttatagcagtgtgagagcagactaatacactgacccctggcctcatgtgcacatcctatagcagatgcttccatgttttcattggactagacctagcttcatgtcaagagacagttgtgagaatcactgcatcaggacttgatatgtaatatatgggtcaaccctttaatttagatttgttctcttagatcaggcaataattcaaatatgatttgagtaaaatattttatttaattttggggggatgaggaaatgtttgagtcttatttgggaattaaggaaaatatagccaaaatcagaagttattacaatccaacattcaagaattacagattccttcatgctgatgtcagtttctcagtccaacatttattttttatcggaaaaaaaagatttttacatatatttaaatcagcatatactagaataggtttaagataagcataaagaggagggcaaaaatagaatttggacatagaaaaaaatccctaaatccagaacatgaggctagttatatatcaaagcatattaaatagatgactaattataacaatatttaagctatatttggttcttttgtccctggcactataccaagaacctagcaaccataccacaagatatttataaatactattattttcattttacagatgaggcagctgaacctgttacatttcttacctgtggtcatgaacctagtacataatgcaatcaggattcacagctaggtttatttaacttcagagcctgtttacagctgttgtgatatactgtggatctcagttcatccatccatttattcaatcaacaaatattctttgtgtctcctatttgacaggcattgtgctaggtaccataaacatggatgagtaacacagatgtgatccctgcttctgatgcatttacagacacgtggctgtattctagtcggctgtgtgcccaatagtttttaacccaatggtccataaaattccatctgtttcctaaatcagtcaggtctcatggggctgattgccaaaatgggagaggtcctctgggcagctgtcggtgttctaacgccgctgacaaactgaccagattctgagccatatggcaagcccctgatgctggctggcatcctcacaaatgcatggagcttacaagggagaagaaaggatgctggtggcattgggggcttcttgcaggttgggttggggaaaaccagcttagataaaaagaaatctaggaaagggtgaaatattcaaactatcagctttgactagagaagattcaatttgagatagaagggatgctgaaattaatgaaccttggttagctggtatccctgcagtatgataagatctatcatttagatcaaggagatttattcttgggatacagcaagacctcccaggtttttggaaaggtatctgatggaatgaggcaaaaatttcagagttagttggccaagttatggtgggagagagtaggatgaaaggctggggtgccttctaggccaggtatagctggggttgaacctgacagcctgggacctctttgaaggccaaagagacagactggccacacccagtgggaatttgttaaggggctgctacctgatgttcctgagggtactttgggagctaaatccaagcatagagcaagcatgggagcatcacgtggatttccatttcaacactggtgaaatcaaatctcctaacacaccgtcatctagctttgccttgctcagggtctgtgcaaggttgagcaggctgagtactggtcattactggccatggttgggcatggccaaggttggtagggataggggctgactaagcacccacccccaccctaaccctggaagaacacaatggaaaagtaatgtgttaagagtgtcagtctaagaacagcacatctgtttgtgttactggtactgaacttcactatggaagcaagtgggtggatagactctaatatggtgcattcaaaatggatattctctgctggctttagcaacagcttcatggttagtgatttctccatgtgtgtgattcgctcacgtaattctgtttagctccacgaaagctgttaaaaaaacaaacaaaataaaacagaaaaacaagacagaagagagaaaccataattgagctagcaacgtgcttaaataggaaacactacagaacatatatctgtttgcgggggatcacaaggtctcacaaaacaaagttgcataggagaatgtgaggacagacagggttatataacacaatgtagtttcaatcagaatgattttgtcctttgacctgactgtaaatcaaaagatacgtttctattctccacccccgtgtttttcttgatggtaatttccactgaatgtcaagctttttgtgtgatgaataaatacccattctatgggtaccattaccagctgtcctagctgctgtaggaactctccttgactgaaataacaataaattatttcaatcatttagaaattagctgcacaattgtcaaagctctggcttatattaacatgatgcttgagaaaaagaaaaaaaaagaaaagaataaaagaaagggcaaagagggagaaagaaaaacatttcgagccccattccaactatcaagggaggctgtctgagaacaaaggcaaagcgacatagtttactcttatctgctctaattattctttatcttaaagtattacaattgattgtattgagcatctttatctatgtctggaaaggatcaaataagagaaaaggaggggctgagaggaacactatagaaagatagatttttgtctcattgcaggaagagctttcctttaaagggaaaatatgctgttatggaaggtccctggaagcagtacgatgcagagttcacctcgggagttctgggttcagactgtcatggtgggacttagcacttcgcaaactgctctgtaccttccccatgtgtagaacagggaaaactgtagtccatccccaaagagacaatatgtgcctggctgttggtgataatcagccatttaatactactattcatgaatcccttgtccttgaacgtgttcaaatgttagatttttaaaaagctctattcagctcagagattgaattcttaggttctgccagggagataaggagatggatgagcagaactcagtgaggctgacggagggcaagtaccctgggcactgggtcttgcttattagttctgccgggcagcatgcggcacacttggtctccccaggtctccatctgcagcctctcagacagcgtgttgagctgacatatggcacagggccagccctgggcatttgatcattgtcagcctcccagcagaatctttggcctgagcacagattggcaggcgggcagtcagtgcttccctctctgatgatgggctagcccggggaaggcccagagccaaaggtcagaaggaaaacaaggaagctgtgaaatcatatcagagaatcagagctcagtcccttcttttcacaattgaggagccagaggctctgaaaagggagatgatatgcggaggctgcatccctcatgacagcagaacttggaccaaaagacaagtccctttcttccagattagtgatcgccctgtttcagcttactgactgtcagggctggcaaacaaatggcaaatggttaggttggggtaatgaggtgtcaggggtttatgaagcagcctttttgtacctataaatgaaatttttaaagtgccatgatatagtcagtaggcctatgtcaagaaagaaagcttgtcacataagtctggcgtagagccactgggcagaggcaggaagaaagacataaagagaaactgttacccagctagtaattgccaggttgaatgggcttgtataaaggtcatctctctatcaggagggttgagaaggcaggactttgtggagccaaagtgagggaaacagaagcagatttagcaagattctttttgtttcttttttgtgggcatgagtagaggagaggaatgtgagactgacattagggtctccacggcattaggtctccgtgaagttgcgagttagtggaaatttgtgtttcatgccttcatcaccttatcttttgtaccttcattcctcttccacatctttctggagaggagtgtactctcacaaatcctctcctcattaaagtgaagaaaataatatgataaattaattcacaccaagatggtggtgactaatgtgtgctgtccgtgcgacctttgagttttaaaaggagattctaagagaaggccagtgccattgcttaccattgagcagggagtctctaccagcagaatgtcagatgaggggaggaggaatggtgtgtctggatgcatattatgagcataattttgttctcagtgcactgatccatttaatcttcgaaacaagcctgtgattacctgagacacagagtggttatgtcacctgaggaaggtcacatggctggaaagagaagtttggaactaaacttagtcacactatggctctaaaacaaaatgtcccttttactgttcaatgcttgccagtgagaagttactttccttatttgtaccataattttactcaagtctgtgaggattttgagttgaagatatggctcctaatgcctggagccggatgtgggatgtgctgaatgcatctccttcagttactggtctctattactaagccagaagctggacacctgagctattggtgacatggagtacccgggttgtagaccaatgctcctatgtgtaataaaaagttacttgcttttcttggaagcctcttctttctgtgtggccactttaatatcccctgcacattggtatcccctgcactttggatgatctggtattgctgtggcttctgtgtgttgtgcagccctgctgccattccaggaatcaccagcaatactgcaactgatgtagtctcagtacatttgggtggactggggtgctattggacgcggagggagcaggcgggatagtgagatcccagagcaaggccactttgcatgacattcaactggaatgtagcttgtatgagttctcaaagattatgtcaccaccatacaattgtctttgggtttctcagtgttttacaactaattaaatgcagttagtgtttaagggctcaaggcttcgtgcaagttaggcccacattgaaaacccaggcaatgcattttagctacatggccttagacaggtacttatacacttcgagtttcagtttccttagctataaaatgggaagcataatagataccttattgggcacctgagggaattagatgagaaaaggtacatgcacatggaggtcgagtagaaggtggttatcagaggcagggaagattggaggaagcagggaataaagagaggttggttaacaggtacaaaaatacagttaggtagaaggaataagttctagcgcttgatagcacagtggggtgactatagttaacaataatttgttgcatatttcaaaatagcttgaagaaagtatttggaatgttttcaacacgaaagaatgataactgtttgaggtgattgatatgcccattgccctgatttgatcattatacatttttttttaattttacatgtttttttttggacagagtctcgctctgtcacccaggcggtgatctcgactcactgcaacctctgcctcccgggttcaagtgattcttctgcctcagcctcccgagtagctgggattacaggtgcccaccaccgcacccagttaatttttgtatctttagtagagatgggatttcgccgtgttggcaaggctggtttcaaactcctgacctcaggttttctgcccgccttggcctcccaaactgctgagattacaggcgtgagtcactgtgcccgactgatcgttatacattatatatattgaaataacatgtattgagataacatactgtacctcataaatatgtacaattattatgtatcagtaaaaaaagaaagaaaaatgttcatggaaagtttttttagtataatgctgacacataataagtatacaatacactgtctatattattaatattaatattactgatgtaaaaatatacaaactccttactaggcttcgtaagatccattgtatttgctcctagaattctttccaaactcatctttgtatctcttctcagactcagcacatagtagatttagagtaaacactatattgagggatgggttcacatttctcttcattctcttttctcttgagaatgaaccttcatatactgatgctctaaaatttattttattctttcagggattttaatgctcctcctccttgtttccctcagttagtatttctgctttctaagattttgttttttttctcttgtttaaaagtcagacacccttccaactcccttgtctcctgcagaggagatcgaaagagatgattcacttttgaacatgtgaaaaatgacttccttgaaattttagttcatcgaacagactatcctctagtgccttccttcacccttgctgcttccttctagagctgaagttaggctgcagatgaggagggcaagaaggagtatctatttttcaatccttgtgtaggtgccaagagacttaactaacagcagctatagaaataagttgtacattttgtctaacttcctttgaagtctttgaagaaataaataaaccttcgatttttttttagaaatatttagagtaattctatttaggtcagttgataagttacctctgttagaactgagggactatataaaaaacttggatgtttcaattattcatatagtgatgtattttgtagttaatatgacctattgtgtattaatcagatgtggactactaaaacctaatttattcagttattcaaagaagaagtagactgtgcttctgtgtgtcaaataatatggttaattttctggatccctgacaagtaaataaatttatgttaaaaaataacaaattaagattccctaaaatatgtagactattgacatactacaaaatacgtatttatatttgtgtttggctggttggaaatacctagatagcaagttcaattttccaattcattttgcaaacacctttctctttaaccttgaaaaatcctttccactgttatttgtgaaaaatcatttttttagcagactgctttctgaaaatcactgacccttctcctgtttggaaaggaccttgaagttcagcttgttcaaccacacaccaaaagctctaatcttccctctagcagcttagataacagctagttcagtggttgtctatcctgggtttatattattaacttatagagacttaaacaattataaatgatcagccccctctcttctacctcccaacaactttgatgtatagtcatgggctacataaggacatttcagtctagaatagatgtacacaattgtggtcccataaaattataatgaagctgccctatacagatgtacaattaaaaaaatattttataccatatttttactggtaacttttctatgtttagatacgcttagatacacaaatactcaccattgtgctacaactgcctacagtattcaatagagtaacatgctttacaggtttataacctaggaacaataggctataccgtatagcctaggcacgtagtaggatacatcatctaggtttgtgtaagtacacgctatcatgtttacacaatgatgaaaccacctaaggatgcatttcttagaaggtattcctactcagtgatccatgaatttaattggtctgggaggagtttggcattcacattagaaaagctccctacgtgcttttaatgtgcctccaggctaaaaaccactatacaagttgacctgctgaggtgctgatgagaggacgtagaagaccagaaggaccacagttcaccttgacattgaggttaaaagctattcataagatattcatatctgaaataataaaggcaccatgtacatttttgaattcagcaagaaaagggcagttttcttatcctgcttatcttaaggtgattgcacagataacatgggcccaggcagaagccagggaaaaaatgccttgtcaaaagatgaagagttaagggagtctgttgaaagtggcagcctcccctcattgccttgatcagtgctccaattcctaacctggaacataccaatctgtcccaggacaccccacacagacatacacttgattttgcttccttttcctcctgctattctgtacttctgacaatcatctccttttcctaccatcaaaatctgtcttggagatgatgtgccgacatccctcagccacattgtttggattcccataaaagccactcaattcccctgccagggtactcaggtctttgtaggcttggtgtaagcataggtgggccagtgtgtgagagactgctggactggcagagacttggggcattctcatagtgttcaatttcctggcaggtcagataaacctgtggggggcactgagactcaaaataatttcctttacccagcgtttatttgggaaatcccctgacttctcagatacttaagaaaatgtcagggctctgaaaataagttactaatgctcctgaaatttaaactcttaagactctatacataagtcagatatgaccccattaaggaggatagtttacttctttatattttgttcgtagaagaaaaaaaattgcctttgtgcacaggtcctgctggaaaactgctctcaatccatagcctttctttgcttggaactgtagaaactgacataggttgttcctaatcttgagtgacagtcatttagctagcagacatttgcatggtctttggagaattatagcacatattaagcatgcctatatcttgttcatttcttatgcacatactccagtgctttttagatcttaacacaaagaatcctgaagaaaaagaaactgtaacactcaaagaaaagtaagatattcaaaaagaatgtgacataggctttaagaaaaagctggagaagcagttagtaaacttatccctttatgtactatatgcaaggtatatttccctctttctcccgcttcttctttccctccctatcacaccctgtccatctaccctcaccccagctgtcattagttgtattcattttatgaatcttacaaataccctaccacatcttgtattttacacaacacacacagtcacacacatgcacacaatttaattcaactgtaagtcttccctattggtttgcaacttgcttttcttatttaaaatatcttgtacattcccattctagataaatggaggatatccttctaactcaatggttctcaaactttagcatgcatcagaatcacctggaggacttgccaaaatacagattgttggatctcatcccccaagtttctgattcagtatatctggggtggagcccaataattttttgtcaatatcacatttataacacattcccaggcaatgttgactctaccgttccaggaacacaatttgggagaagactttctaaccgcttcttttagatagctacataatctttaatgatagagatacagcatgaatttttctgtcattccactactgattctgacaaagattctttgctttacctaactttagccaggctcctaaatcttttcctactcccatttgtgcatttccttgtaaaatccagttttaacaaagaatcctgttaagtcagtttagtaagaaccacccaccctcaatatctgatcaccctccttgtctgatgaagttccttatcctcccccatgcctgacatgatgtctgatcaccctggcccgttgtttacaagaatcctgttatgttggagttcccattatccctgatgttacctcgtagtaatttttcatccactgacctccctcacctccctactccttagctataaattgccgctgcccatgctgtattcagaatgaagccgtctccccaccagctcacactgacccccaactgcaaattcccattgctagggttcctataactattgcaaaggtcctaaataaagtctgccttatcatgccttaactagtgtcattgaatgtttctgtttgtttgacaatatacatgcaattattttgtctctacattcagtggtgcaataaatgtccttatactgttatgttcatgtactggtgcttttatcttgctaggatccgaaacttaaaaaaaaaaagtcttttgaactagattatgagtcacaggagaaaatcagtctcactgctttgtggccacacttcagctagatcttattgctagacttggaaccaaataatgtcgactttttccagaagtatatcctccctcagaagaatgatattttccacttttgtggataatcaaagatatatgccccaggctcctacagcatttctagaaggggagctccagctatgcaagttgtcagcaagggcaggttgagtgggctttgtgctcagccccctggggatctgctttgcaagacatcattcactgggcaataaaaggtttggtgatgttttcattgttatttaaaagtcagttaacttactttgattatgtacagtgccttgggccttgccttagaagtctagggaatgaacacttttaattgaactcctgctgtattctaggcacttttaaaaacaagatctcatggcattatgataacaacctcgggaggtgggactctgcacaggttaattttgtctggttgttgaagaaaatgagtctcaggctactgaagttgcttttctaagtctgttgatgatggtatatggccaagctaaaatttgaacttagaaacttctggcttcaaatttatttatttttttcctggaaacatactgctttatacgggaagacttgaaagcagcaaatagagtctctatctagggtatactgattgagtttgaggttgtatagatattggtcattttaattcttttttaagcctctgtttcttgagttatatctgttgtaggcagcatcatttactcattcaattttgggcaataatcatgactggattaaacatttgggttttccatttatgctgatttcatctaggtacaattttctatctctcttatgtatctcatttttctctcccttcctttccttctttctttctttctttttttttttttttttttttgacgaataaagagctgctgggtcatcacttctcagcctaaagagtcactattaatcttgagagcagcattcctggtcgaaaagacactaggacatggtttgcaagcatccaggaattagtctacgcactctttgggtgttatcctcaacggtgtcttctctattcggtttctttcttgtcttggagtcccagttccaccttgttatgaattccctatccctaccctctccactctagcttctcgttgatcttttatagcttattttctagtgcagtgtttaacctctgctctgaaatcattagtctatttttcctccctacttagtcggcacactgattattccagattctatggttcctgtttccaaccctctcagcctttctcgtcttttacctgactccctaggagttggcgctgtgatgcgatgcttacttgactgtttatgcctccatctctgacctttttctgaaaatcttttcatactgtggcttgctaaatactgtctgacaaatcccctgctccatttatcatctcacatggttctttaactgttgttttatcttctgttccttttaagtccttgttttcttcacttctttatccagtaacatagacatgtgagcagaggaaaataaaaatagaacaccccccttaatagtcgccagcactacgtctaacttcctttgttcattaaggtagtactttgtacattttaatgtattggtagtttttcaagtagttgaaatgcctagattaattgaggtagggattgcagatccttagaagggttatggagcacagggaaagaatcattcggctctggttaaatcttatttttctttattctcattctgtgtggagttattaggatggatttccttagaatgtttgggagttttcatgttcaggctgctttcaaaatcaacagtctccacgggtggatactcaggatttggggtaacaagaggaatgagttctgattccaccctatgaagcttgtgatgaagcatttccaatacattattgaatttgattacattaatagtcctgtgaagtagatcttcatattgctattttacagtcaataaaccaagctcagaaagatggaagaaaataaacatttatctagtatatattttctaggcagtttggctaaaggataaatggcttgccccaaggcacattgctgtacgcagaggagctagaattcattgttttacccactgtctcaaagtgctaatggtcgtggagtcatacttttagggacttgtagctcatggactgaggtttcaggaatgaagccctattctcctttttcatcttctgcctcttcctttatctccccttcatgattctgtgaacctctttcatatttttccttctttctaaaccaacaggtttactcttattggtctgtccttgacccagcattgatgccttctctccctctctctgccagcctccaagcatcactgcagccctcttggaattctagttgatcttatcccagcagctccagcctgaactgtgagaaagaatgttctatctgtcctgcatgaaccagaagaaagaactgtcttcaatataatggagatccaataatctgttttgacagtgatgttaattccaaataatttacgggttcttgagcttttcatcatggtaccaggttttctatggggtatcagacattgggttaaaactgattcatgcaatgaaatggacaaatttgagttgtggtcagatgttttaattagctctcttttacttagagttcctcctgccctgatggttgaatcatttctaccaaagttctttgtgcttcagtgaggttttctcacagtaaaaagggaacaagcagatctggacttaaaaataggtagaatgagtagtatcaggaaattctgtcctaatggtgtctgtaataatggctgaaaattcaatattagctaggaagtttcactttgtcattaagtttttttctttttctctaatgcctcccccaacttgcatacccactctggcatgcacaatgttcctatatcactttgggacgagaccttgtttatgtaaatttcctatattccagacactgttttaaggactttataagcattagtttatttaaacacatgaggaaggtactagtacaaatctcataccacaggtgaagaatctgaggcacagacaagttaattaacttagccattgttcagcgggctagtaagtggcacagctggtgttaaaattcaggcattctggttccagagtctttgctctcagctactctgatggttttgtttctttctctgagattcatggcataaaccctcataaatactaatttcacagtattttaattatttgtcaaaagatatgcgtcttcattcaccctgctccattgggatgagagctactcaaaagcaagggttttgagttattcatattctccagcagggaatcttgccatgacttgttcagtattgaaccctgctgcttacaatcaggtaggctctctataagtactggtgaattaatcttttcaacctcctgctccaattacagtgaaacacatgataggctccatgaatgtcaagtaaatatatgcattttgtgatcaaggggtatggtcttaatacatatgtgcttgtgaataattccccaaattatgaattatatttattccattgtccaagcttaatgactatgtagtcagtgtttattggtgtacttccctcctaccatttttgcagttacagaaccattacaaatggaagactgggtgacaacaacgtaaattactgcagactgaaagaacttggcacatgttgccaggaacaggtatttctttgagtatcttggaatgcttgaagaaggccacagagggtttcttccactccttttggaggtgctccaaagctttctgcgatgctggtgcatttagaaatcaaagcagcccatcaagaaggccaattctaggaagaaaacaaacaaaaaaagaagtcatttgccctcgccctagccctccctctattttatcctaacttcttctttatttcttttaaataagggactagaaaagatgtgaaaccaaagaatttcaattttatcacttaattttcattttatgatgcagttagaatgagctcttcatttatttgtttcgtaagcccaagctttcactaatgttttcctgaattttatattctgtttcagtatggtgtgatggtttttatttttttcatctaaaaatgaagtaggcattcttctaatatgaaataatagtgtgtctcacatagttggttatttagtgctgtgttttaatcgtcagcatgaggggccacaagttatctgcaactcttctgcttccatatgtgttttcttcctttgttattcctgcctgaccttttcttccaagaatagaatgagaaagcaacttgttatatgttcttcctctgtaacttatattgtaattgccacatttctgttgtgatattgatttggaaaactcatcggcattctagcgtataaagtaatagaaatctgaatcctgctggagggagttatttagtctttattgaagtgatttacagagagctttctacccaaataaaatgctcagagaaaaaaggagatgtactgatgcaaaagcgtgcctgtttctcaagcagcaccaagaatacagagattgtgtcattctagcttttcatttcttctttccttgattttatgaatgaatgacactaatgaaataagtaaatgtgcattatgtatgtgtttctggacagttatggatgactttccaggtaaaacttggcaaagcacatttctttaacataccaaataatttaaaacttactagaggagcctcttaataaaaaatgttgtagacaatatttttgcaaaaaaaagaaacctttttcaaaatgaagacttgttttgtccacatatttcttcaaaaaaaaatcttacttcaatttgcaatgttcacaaacagatggaaaaactacatttgattgatacatgaaaagttctcacagttcccatagcatttgtctgtgagttcagctgggttattgtttctgtttcatgctatcttgcttaggccccaacaggatttccatcaaagagttcaatgaaaataagattataaatttggggttccccaaggaacagcatattttagataacaagagggctacatttggtataatagataccttgcattgttctaataaatcatcagtaaatatctttcaagtaagtgaatttcatgggctgtaccaggtacgtgtaagctacatgtcattgtatctccaagccaatggataggatagactagatatcatgaagcatcagtttagccaaggaggtttacctgtgattaggcatgccatgtttactcatagccttattaatgccttccaaataccttaacataaagaaatgtctttcagggagagataaaaagtctcaaagaggttgtaagtcccacattaagaaagtggtagagctatgattcagacttaggcttacttcacatgccacgcgcttcctcactctaaaagtacctccatccttcatgcacaaagacagactaccaaaaaggagagagaaaataagaaagataaggaaaaaagaatatatgcagaaactagtgaaaatcaaataaagtctctacactaattgactgcattgtacctgcattaatttgtggctttcaataatgtaccagtctgttataagacactactaggggaagatacgtggttagtacatgaaacttctttgtactatttttgcacttctgtgagaccataattagttcaaaataaaagttgcaaaaaaccccaaaacttcactttaatgatctagggcactcgtgagatccattatttctacgaaaacaagagtttcctaacatctatgagttaacactacaatgcaatgctgacttgacatttctttctttttttcttttttaacaaactgcacagtctgaatgtttatgtcttcccaaaatgcatgtgttgaaacctaattcccaatgtaatagtattaataatatgggggcttttggaggtgattaagtcatgaggatggagttcttatgaatgggattagtatccttataaagaaacctgagggagcttgtttgccccttctgccatgtgaaaatatagcaagagtgagtcctcaccagacactgaatctgctggcatcttgaccctggacttcccagcctctagaattgcaagcaataaatttctgttgtttataaattaccctatagtgtttggttatagcagccccaacaaactaagatacaaacataatagaatatatttattcaaataagtgttcgatttttcatggaaggatttacacttttcctgatcattattctgttgctaccagtgtccttagagtatcttgtgaggaattgctggaagaacctgtggcctattcttttggatattctctgtacccatatatttgtgttttgaaggcaggattggcttttgaaaaagccaagagttatcagggcgaagtcttctgaatacagtaaaataaactaaatacaatttaatacccacacagtgctaaaatttggaccctatttgaaaaaccaaaagcagcaaaagccatgtttaatacagtattatttatgtttataaacgtggagctagctgtgtgcagtggaaagtttgaacacaggctacagagatggatgttattgcgtcatgtgctatttttcatttatttatttatttattttttttgagatggagcctggctctgtcacccaggctagagagcagtggtgcaatctcggctcactgcaacctccacctcccggttcaagtgattctcctgcctcagcctcctgagtagctgggactacaggcgcctgccaccatgcctggctaatttttgtatttttagtagagacggggtttcgccatattggccaggctggtcttgaactcctgaccttgtgatccacccaccctggcctcccaaagtgctgggattacaggtgtgagccactgtgcccggccatcatgtgctatttttaatattagtacccatttctgtagacgcagaattcaatatcacattgagatgatgattatcaagtgcctaacacagggcctgctcactagtaagtgatcagttaaaacttagcagctttaatcatgatggaggaggatgatgaattttgccccaagaaaagtaccttatttttttctgagccttttttattatccaaataacagagggcttgaaccaaatgaaagctaaatttttcagctctgccattcagtaacttggatcctgaagcaggtgtcaggaggcaggacggaggtgttgaaggtgctgaaggtgcaggtgagatcaggaagatttgctgtttgtgtggtggtggtgtgacggcttataggggtcttactgtggcacagagttttggttttccccctcaatttacctctgagaaagtcctttcctctttcttttcttagggtctgaggttttggtcattttgctaacatcttgagactgcactgacatctattctgtcttagaaatatcatagaaacaaatacccaagaagttcattatatgcctgaacagccagaacctccaagtaattgataattgtttgataaacagacttgtgtctcccagtgtgactgatggaaagccgtgtttctggcaggttggaggctgctgaatatcagttgcctgaaagatagacagacttttccagctgggaaaaaagtcagctcagatattacggagtttactgaatttggttggtgatatctgacactaatccacaagttggatagagcagcttctggagagtagacactagtagctagtagacattaggtactagtagctttcttgctgaacactgaaagactgacaagccacaaataggaagttggcttctaggtgcccctgagattggctaataaggtcaggggttggatttcattgcagagtttagtatgtctgtctgttggacctttgggatgggcatagacatgttggtaccttatggggggtatagtctaggctaggggctggtgtgcagtgatgaggaagtaggtggtaggcaaggggcttatgacattggttggtggggaacctttaagcaaaagggaggtcatcctatcactaacttctctaagtatctcactatcttatttttggcttcaaaatattttttcatcatgttcttgcaatggccatgtcaatataccttgaaaaggtcccactttttagaatggggcaatagcaatataaccctaagacatgggcaagggtggctcctctactgagcctctctcattcagaggactctgctccagccctccttcagcattcctttacccgtgcgggggagagaagcattggggccaagggagcatgctcattcagagcccacatccagtgccatttagacatagactactcagaaatccctgacaaatagtctagatctaattctgggaccttcttagatctcttgcctaccactttgtctaccactttctcttgaggcagattgagctgctgttgaacatacttcttggcaaagcagtggtcaaagggcagctgttgggaagaggttggagttgcccccttatagggcaacacagggctggggatggaaaggagataaagggccagataaggatttgggagccacaggtcagctggccccctgccttcacatgccagtacagaatttcaaggcatcagagtcatccaaatttgaattccaaatttggatttttgttctatgtcccaaaaatgtcatgagtaagcctgcggaaaacagcagtgtcccctacacccagctctcctcctggccagggtcttgctctatactggactgaacttgccaatgaggttagaaagaagggcagttgtcagtattacttcattcattcatttaccaaacattcattgaatacctactgtgcgctaggctgtgtgtatggatactgaggagatgctgtccaagacggatgtgcttcctacttcttgaaacctgaggaatagagaaagcatacagaagataggagtaagaagaccaattaataaagattttctgattgtgataaaatcatgaaataatagtgataaagtcatgcacctaagcaactgtgtctggagacagataaaaaaggggagaagagtttcattgagatgagctactccagttgggtctctctaagcaagtgacatttaagcaaagtcctgaagggagaggaggcagccatgcaagactggagtggaggggggtttccagcccagaagacaacatgtggaaaggctatgaggtgggacataacttggagtgatgtgcagagccagatcataaaggtccttgcaagcagcccatgatagggggttggtatattatcctaattgcagtgggaagccatggaggccttaagcacagtatgatttatatttctaaaaggtcattctgactcccatgtcagaaatctttggaagaacggaagcaggaagactgagtagggggccctttgtaagaattcaggcaagagacgatggtgattgttcttatccatgagaaagccagggtgcttccacgataagatatcttccttctcataaggtagcgtttgctaaatcttaaagactggaactcttacctttgtttgtgaagaaaagctgtactcatttattatcctgttatttattatccaatatatggttattaagcatggcgtatgtttttaaccctactgtaggagccagtgatccaaaggtaaaggaggcacagtctctactaaaaatatctggagagattcattctgtttagaggcaggagccagggagcagggactgaggaaggaaccaagaagaggcaattatcactggagagtggtattaaaacaaaggtttacctaatttccagtttaactcatggatatggccatgggatatgacctcataggagccagttgttgcagtcctagactatgaggaatttttaaatgttgattgcttatttacttcgatataccataatgtaaggataaaaaaggaagggtgagtaacagtagaggttttttgtttgtctgttggcgggaaagtggtcctttgtcctcaagtttgttaaaaaaaaaatgcataaagaaggtggccgggcgtagtggcccatgcctgtaatcacagcgtttaggaggccgaggtgagtggatcatgtgaggtcaggagttcaagaccagcctggccaatgtggcgaaaccccatctctactaaaaatacaaaaattagctgggtgtcatggcacatgcctgtaatcccagctactcgggaggctgaggcagggaaaattacttgaatctgggaggcagaggttgcagtgattgctccactgcactccagcctgggtgacagagcgagactccatctcaaaaaaaaaaaaggttagaaaatatgcagaactagaagtctagaggacctgcagataagggtggggcttgcagggaggcaaatggaaggcaagagagttactatgagagcctagggataggatgattatggtgatcctggcagctcagtggcaccaaaaggactatatttcacagactgcatgtatctagccatggctgatgaataaatggtaatctcttacagtcaacctactcccagtgaagactgacttggagggaggtcgtggagaaggtgccacattactcattctgaatcctgcagcacattctacctgaagcaattatagtgggaagatggtatcttggcacccataggctggagccatggaagcaaactctgaacatgcaatactaaattacctgaaaggaaggatgctttcccaatttagtttagcttttgactgaatgaaataaagtttgtgtccattaggtaccagattttcatgtacattcacggggttggattcccacaactcttggaggaggaaggaactgtgttgagggttgaatgcccaagaaaagactgggacccaagaaggcccatttttcttgatctagggtggggagagatggagcctatgcagggccagtcaagcacaagacagaattaaacaaggcttgtgggctaagcaggaaggagactggttgacacattctcccgtagaacagggagggtatcactggtttattattttagtgaacaggcctccagttattgtcattacacgtgtcaaagggctaggagaggatgaggtctgcctcgccccatcccaccttctcgttcagcttgtcagtgaaatgtattaggtacctactgtgcccacttgtctgctggaccccttaaaggcatcacacagtcaccaagtcaatatgtacaacttttgcttacagtttaagaaaagagaatttaaggacagtactatttgagaacaactaaaggtaagaagcacctgcatccttatctgaagctagggaaggtcagttctgatgagagtaagggcattcggtgtggactggtgataatgaccccagactccccaggcctcaggctcctcagcgattgagctggaagccagatcattccaagtggaaggaacagaggagccaaaggctacaggggtcaggctatggtgccctcagctgctggcacgttgcaaagtgagttacgaaacagaatacaaaataaaagctagtatttgtaagaaaacaaaactatcatgaagggctttttctaaaatgtcgattttctttgtgtgcctagataatgggtgatttagagtttctacttggtcattacctatatattctaattttcctaaaatgaaaatatacaacctctgtaatatgttttataaaatacaggcacttaagcaattcatgctaaaatgaaagtctggacattttgaagaggttataaatgctgtactcattggaacccacctcaccagtgaaagctccagactctggcatgcctgagtttgctcagcagtcagtttacattttactaaactttctcaatctccattattgctccccaacaacagaaaaatattcagtcttacgatcatgggtgcttgtacatcctgagtgatcaaaaatatctctagagaatagatttgatgctgcagtaaagggcctttaatttttctagcctgggggtccctgactggctgctcacagatgtgtgtttgttttttgtctttgtgtagtttctggccatcataggattttttaaaacttgagctaacattaaaaatcagagtttatgtataaacatttgaatccctggcttctctttccaaaaccatctgtcttacattcctgcccagccacacacagcttcaatgcaggcacagctgccccttggatgatcagttctctgcagtctttacaattcactcttgcttcctgacgctgaggccaaggcagttgtcatttaccaaaacagtttttgtttcttaatggtagagacctatttttaaaaatctatgttttaacaacagtaaaaaataagaaggtacatcagaagaaccatatattttgagagaagaatgagaaagcatattttttgtggaaacactattcaaacagactgcagacaccaagtgacatggttggcttttgttggcactggagattttgctgctttgccctgagccttaagatcttcctcatggtgctacactgccagcaaagaagagtttaaggagagaatggaggtgggtgtccatatccacagcctactcctgtgtgtgaggatccacccccaccatatcccatctcatccccaaaacaacaacagcaacaacaaaaccagaattgggcagttcctggtttagaaggcaagaggtaaatttcagtattgccttcccattccaacatagcttatactgttacatacctacattttcctaccataaattgaaccatttcctatcaaaccaataaaatgcaaagtctttttattatctagataatgactgaatgacaaaccaaagggccttcctcggtgctttttattgaaatttcctgtggagccatgaattctctgttattagggtaaatatcaacagaagacaggctggttagatagctacttggaagtgttgacaggaaattaaatttgcaaacagaaataaaaccgtggtagaatttttgaatacaaggacaaaagcaaggaaattgaatattgagattatttgtagcattcttccctggggatggagaattgaagagcacatggtttgccattcatcggaaggtcaaacccaagatgacttagcaaaatagtcattcttaagaccaaaaaaattatctcacaggcccagatctcagagatatagacacctaagcaaatgaggtgtctgtgagttgggtgatttttactcaacatgttaatttttctgtttgccatttttagagatgatgctgtacagtcatcagcacccttttccaaaaaatatgataaatgtttcttcaaataacttaacgatctcattcacacattcttcggtgttaataataagtacgtgtgccaatgatgaagtggccaacagtatccctccactggaaagtgtaaattgtgtcattgtatgttgagttaacaaggattagagcatactgggttttatattttggcattttttcccctttatttttgagggtaaatctgttggtccatgtaatacacatgtgctaataactgctgatttaacaaagaagttgagaggtggtgcaaaataaggagctcataaagatatttttaatttattaagaaaagagtaatggacatttatttatttacttattttgataagtaaaggactggagctctcaactacaaatatgaggtcaagtgatgagatataaatatcccttgtgtgggcatcaggaaatctgctattctgtcaccaaacacctatgaaatcatgtgaagtggaggtgggagattaggtgttttgggacttatttcagggtctactattctttgacatgatgactttgttcacatatgcatttgaagagctgccttaatcataaaataatgttctaatttactaacagtcaaatcttcctagagaggtctcaaactgccagtctgtgtatcatataaggcctgttgaggaaatgattacagtacacagaatattgccacatatggaatgaaggggaaagaaaaaacagaatttattacaaatagttaaacatttagcatattctaaaagaaaaaaataatggcttgtgcttttcttaaaaaaaaaatcaattctggcaatctggggtcatgttcctatcgactagagcaataatgttagggcacagatggatttgcccttgtgtgcccttctcaaggttcacccagtcaccagatctcctggcactgaggatatgtcaattgtcacttatctctttatttttttacattacttgccttgagagaactgagctaaatgtcattcttgagaatagcacctatgtcctttaattagctgaacccatgaccacagatgatgtctgattcacccccaaggaggcaaaacaaatgtgtagagatatctgagaagtcgggctggagctttttggctctcggggacactctctcatgttcatgtcaattaggacagattttgttgaaaacatattttgcacactccttaagacccaaatggcagatgagcttcacgtaactgccaaattttctctttttcaacttacttctccaggggaaaaggtggaaaaataatttgatacactagttgtaggaaactggactttaactcagtgtttgacaatcagtcaattctcagaaaacaaagtgacagaagtaacatagcatcaagaagcaaaaaaagcatttttcccaggcaattgttttacaactaaattatttatgtgtattgaggggtttaagaattattaaatgtattttctcccttggctcagttctttacattttttctatttataagaagtgaaactcagacgacaaccaggcaggcaagctcacagacgggtttactgacaacaccacaatgctcctcccctctcttgctttctggcctcagacataaggagcagtctctttgggaatgaagggggcatcatggaatgaaaaatagaatgccctccaaggatgaaatacagctaattacatgttgttcacctgcttagtttcagagggtggacttatgacttgtgcctgttgaagaagaaaattgcttgatagcagtggccatgttatcaggattcataggagagagatgattatctgttaattttagagtaaagaggccttttactaccaggcaaaaaagcaaaaatcatgcatttctcatgcataacagaagttctttgttttggtagaataattactatttagagtatattgggttggatttgtaaaatgactggcctagagtttatagataatcagtctcagtatggagatttcagaacaggaatgtgcagatgtggtggcactgataaggaatagaatacatttgtacctatgtggtacacatacacacgcacacatacatacacagaagcatactacgtaggagaaaaacaggctttgaaaaatgaacacttgtttttgattctgattatcttaagtggttgtaataacagtcaatactaactgattgctttctagtctgttcctggtaaatagaaataaattttaatttgggaaatattttctttaaaaaaatcaatagatttatgggtacaagtcatttttcattataaggatgaattatgtagcggcaaaatctgggcttttagtgtacctatctccagaatagtgtacattgtacccactaggtaatttttcatccctcacctcccacccatcctttcccattctgagtctccattcgttatactactctatatgcctttgcatccccatagctcagctcccatttataaatgagaacatgtggtatttgattttctgcttctgcatcactttatctaggataatgccctccaggtccacccaagtttctgcaaaagacattattttattctttcttatggctgagtagtattccatggtgtgaatgtgtgtgtgtgtgtgtgtgtgtgtgtgtgtgtgtatctcacattttctttattcactcatcagttcatgggcacttaggttaattccatatctttgcaattgtgaattgtgctgtgataaacatacacatgcaggtattttttgatataaggactttttacccccctttgggtagatatccagtagtgggattgctggattgaatagtagatctacttttaggtctttgagaaatctccatactattttccttagaggtcgtactaatttactttctcatcaacagtgtataagcattccctttgactgcatctgccccaagacctgtggttttttgactttttaataatgaccattctggctggggtaaggtggtgtctcactatagttttaattagcattttccagatgattagtgacattgagcattttttatatgtttattgcccatttgtatatcttctttgaaaaatgtctgtgtatgtcatttgcccacattttaaatgggattatttgttattggtttattttctcgctgatctgtccttgtagattctggatactagtcctttggtggcggcataatttgcaaatattttctcccattctataggtggtctttttatctgttgattatttcttttgctgtgcggaagctttttagtttaagtcccatttatttcttttcgtttttgttacattttcttttggggtcttagtcataaattctttgcctaggccaatgaccagaagagtttttcataggttttctcctagaatttttacagtttcaggtcttaaacttaagtctttaacacatcttgagttaatttttgtaaacggtgacagattcttttccatgtggctatccagttattttcccagcactatttgttgaatagagtgttctttctccagggtatgttcttgtatgctttgttaaggatcaactgattgtaggtatttggctctatttctgggttctttattctgtttcattggtctatgtgtctcctttatactagtatcaagctgttttggttactatagccttgtaataatttgacgtaattaggtgatactgtgatgcttccagatttgttctttttgcttagcatttctttggctatttgggttttttcttagtaccatattaattttaggatttttgttctaattctgtgaaaactggcattggtgagaggaattacattgaatctgtagattgctttgggcagtatggccattataacagtattgattcttccaatccatgagcatgggttttttttttaatttttttgtgtcatctataatttctttcatcaatattttgtggttctcattgtagagatctctcaccttcttggttacatatattcctaagtaaaaacacatataagtatttttaaatttttatttattaacagtttttttcctctgatcattattaggatccattttattataaccaactcttagagtatcttggaacagttgttctcgatcagagattttagctccttgggggacagctggcaatgtctagggacatttggcaacgttctgagacatttttggctgccggacatggtgatgaaaaggaagagatgctactggtgtctagtgggtaaagactagggtgctgctaaatatcctatagtgcgcaggacagcctccagcaacagagaatcatctgacctaaaatgtcaataattccaaggttgacaaaccctatggggaacagttaaaggaatgggatgtatagcatgatgaagtgaagacaaaggaaagacctaatggctgctttcaagtttttagagggcttttatatataagatgggttacacttagctctgcttatttttgtagggctcttggatcaacaggtggaaactataaataggcagatatggaggaaagctttctaaaagatatctacaaagctgaaatgtactgccctaaaaaaaggtaaattctcatctgtagataactaaaatgtaacttagtcactagaaagggatgtcctctaattattatacaaaactgatttattgaaaacattttaatcacagatattgtgataggaaattggagtccacattggaaaggtcatttaaataatttaagtggccactttcagatgcaaagcttgaataatttcattcttttgtcaactttggagaaagcttggttccatatacaacattatgaatgtatgtaagtagcacttaaggaagatatctagacttattttactaacccttccttttacttctatatggttttagaaatagatgtaacattttcactacttttccttacataattttctagaccagcagttttctaatttaattgatcatatgcccaataaaaaataaaatgtaaaccttacccattatttgcatgttaatataatttataatttatttttcccacaaattaaagttttaaaagttgacaaaatgaaaaattttatgcattttcctacatggaattggacaaagagctctaactcaatgcttttcatctaccagaggtgagaaggcacagtgttttatttttaaaatgtaaaaaaagataattttaaaatttattataaaatctagatgaatggtatttttttcagacctataaaataaaagccccaattttaaaaattagatttaacagacatgaaattagtgtctaatattcctgtaagagtttccaaatctttacacccaattcctatgtttatctcatcatggagtaggactggtaagtttgcagacttgccccagtctatgagatgtaagtatcgttgcttgtgagaaaactaggcctattgtgcgacctgaacctattgatgtaaaattttgtaatcttaaattggcatcttgaattttcaatccagggcttatgtgagatgtctttaataattcagaacctttcctacctaaaattaggatgctctgttgattggaggtagaagtctgagcttccctttgcaagcttttacgctaattatcacatgacagcaagccattcacttatcacctctatatgctagttttctcatttgccaaatgtgtctaaaaggaccctctatttttccctgacatggcttttatacctagagaaataaatgtgtaggaaagcactttaataagatagttgcgataaataaatgactcctaggaatcccacaccaaggaattcatttacgttcaggtgggtgaacaggtgagtgaaatgtattttctagctctaaacctaagcatcttttgagccacttctgagttttgcaaaatgcaatgtccatccaagctactaattagttgaaaactgagccacatttggttacctggacattccttttcattactaatataccttggttgaggtaaaatgccaaattatatgccagaaacctgcaagaatgacagtaactctggtggctaaattagtgcaagagagaagtttagctgtgaaagtaatctctattattttgtgcttccttatactcaaatcatgtttaagtgtctaatggcagaggagtcgtggtacaaatatgtctgttctcatttctttggggtattgtatacattgacttaacaccccattcccaagttcctcgtttgtaaaatggtgataataatagtacctgcttcatagggttgttgttaagggaactaattagataattcagtcaggaacttaaaagtgtttggtgcacggtaaaggcttaatacatgacaggtattattagtatgaataatgtttgttttaacagaagtacctaatcagaggaaattatgcttcttaacaagtggtacaatcgcttggtaaacagattggtctaacactagaaggatgttaaacctgaccttcttattggaccctcaccagtcaaaggacctcagagtttttcgtcttattctgcttcttagtacagggaacatcatctttcagatagaaacaaagcagtcgtctattattaaggactacaaacttgttgagcttttgctttgcagcctctatggatcacggattataattaagaaccaaggtttaatgcctccttttaatcatgcaaacatatatgacagtaaatattaaataagaaaaaaaatgatactataaaggacttcatgccttccacaaacctagaaggtaaacaagtgtctacttgttggaaaaaacaattgtaatttcccaagaatatatctgatggagaaccaagtttagatggccatatcggggagattacttccagtaaatagatctcatttgctatgaatcatggacatttaacaacatatgcaaaatgttaagacttagaattgtatttcccaaggtcttaatttaatttaatttaatttaatttaatttaattacttcagtcatgtaatagtctttagaaataaaggcaacagactttgattaatctggtgatccaatcctcctcctcctcctcccaaaagtctgtcagacatgaatctgggccagaattttcatctgggaacaccttgaaacctaagtggctgagtgtgagcttcatgtaatccctccaataaggaaactctaacttttaaagggtctcttgacatgcgtggtaattacaggagtacagttcctggtactggtaggtggtggctgaaaaaggaatatttagagcaggggtcagctagctttctggaaagggcctattgtgatcattttaggcgttatgagacggacagtctgtcacaactgctcaactttgccattgtaatgtgaaagcaactatagacaataggtaaatgaatgagaatggctgtgttccaagaaaactgtatttacaaaaagaggcagcaggctagctttaatccaagggccatagcttgctgacccttcatctagagaaatggttgctaatgtaacagggagctactggccaaattaagctagaaggtgtattattttttgattccacagtgtcaatctccatgatgttcatattttctactagttgccaacatttaaaaatcaggagattttttacatacaaatatgcaatctgatatctgaaaaacatgcaaagatctggtaacacccatctgtcttcctccacagcaacaatagttgtgcccgcttcagaacaagaacttgctttcttgttctccacaatactcaccattccctggtgccttccagaaattcaggcccacttccttcatttacactacctgtcttgccctggctctgctcctggaagaacttgattttgtgaacactttttagtagatcttatctttcttcctctttcactccttgttcctgaaagctatctcattttggctcactgaggctgaggaccaggcatgcttttgcaaactgatatatggctgtacaatagtattagtgtctctgagagagtagcatagctgagctctagaagtagtgaacattttgtaccttttgttcatttcctacagccatcctaaaatgatatatcagttttcaagtctgtttccctctcccttctttctttcattcccatctagtacaccagaaaaagtgtacatgtttctattcttatccttcagcattttatatcttttaatcagatgatttgcagtctctttttgtccatctagagtcatgttgttgttttatatatatatatatatatttacatatgtatatatttaataaaagtagattatttattgtgcatcaaagatgatcaggtctgcactgaatgtgagattttaattacatgattcaatgtatttaattcaactcattcaatcctactatgtaccaggcactgtgttgggcattgaaatgtaaagtcagagttcctgtcttggaagaggggtgcaagtaaacagagactttgaaatggagaatcttatctacagaatattttgaatttacaaataagtccatatatgaactaaggagaatggtggaagacacaactctttaccaaaaacttattttaaatgagtggtgagttggtttcagttcagaaaacaaagtattgggataaataggaaattctgtgatttgataaattgagtcatggatgttttatttaacatctgaaaaagtactctgtgctgaagaatgaatagtgagacttcagtcttttaaagacctgtgcagggctgtacagtgtagcttggtgccaagcagacaaaaactaatgaagagaaaaccttgcaaggatttgtaaggcaataaatgaacttcatcatgggtaaatgtgaagtagctgcttgaaggaaaaagaatacaaattattatgagatgatgttctttgggctgtcagttatgctgtataaaaagagtcattgaagaatgttcactaatgacattagtccattatgagttagaaataaagtaccaccaaagtattgggaaccaccaagaaatatatagaaaaccaaacattggttttttaatttttttaatttaaagtatgctcacttatgtgtggaattctgaatgcgcttgtggtcaatacatttaaagcaagatttgtgatactgatttataacacgtacctatgataatccagacatgtagcagatgttccacaaagagcagttaaagaggtatatgtgggcatgtacccgatacatagtgtgtgtgcattagagagctgttgaataagtgaatatgggcagaatgggactgaaaacagtgtctagtgtcttaaaattaataatagtaataatacttggctcattggctgttcggcgaaaaaggaatatgattgaaatatgtaaacaaacctctgatgcatatggaacaggaaatagcctttgtcctagtctatagcacatgaatgggagggagaaggggagcagtttccaagaaaggaatgcaaacctgagaaattgctgtaggacagctatcattgttttgataccaaataataaacatggaactcattctgtgataatgtacatacttataattcaaaggcagaaagtttttgttaaacaaaataatgggtctggctgggcgcagtgactcacacctgtaatcccagcactttgggaggccaaggcgggcggatcactaggtccggagatcgagaccatcctggctaccacggtgaaaccttgtctctactgaaaatacaaaaaattagccgggcaaggtggtgggcacctgtagtcccagctactcgggaggctgaggcaggagaatggcgtgaacctgggaggtggagcttgcagtgagccgagactgtgccactgcattccagcctgtgtgacagagcgagactccgtcttaaataataataataacaataataataataatgggtctatgaatgaatcttaaaaatgctttactcatttgttttgcagaatagtttgtaagtgtacgtgtgtgttgtttgtgggtgttttcccaagtcctttaaatcaggcaaagaatgtgtatataaattctactcttattttcatccactgtcaaactaacttctgtgaaatattctaggaaactttgatcagaatatttgtttttggaagttaagtgacatcattcatccttttgagccaaatataatcagcatccctgtgccaggaaggaaaaaaaatacctttactcttacattgactattccaagaattacttttctgataactccatacagggtttctccgaacctctctgttcatttgcattcctaacaatttgggattttatttagtggtcaagttgtattcaccctggagcctggaatgaggacatccagcctgacaacctgttaaacaacttgtgaatggaataatgaatgaaaaggtcagacagtccatttaaggaataacattttttcagatttcaaatgccattatattgtgacaaaatccatatgtgtttcagtagaacaagaatggaagcaaggttttaacctttagttttaataaatattttttattaaaaaattgaaacattttgattccttaaccagtgaactgaaaacaataattggaaaacaaaacaaacaacaataacaacaacagaatcacaaaaaagtccagccagggcactttctagtttcacagatttggatgaagcaatttaaacatacatcagccaaggtacattcaatcactctctattacttacagcagtggttttgagtattgttttaatggtgttttatcttgagcttcatgatggtattttgcaaagcaagttaagctttaggagtctagcttttgatttcaccatattttttttttgcatttgtgtgacattattcatgttgaatttggttccattctttttccagctcctaattacaccctcagactctgtaaagatgcatttgttcctaagtgcaatcaagaagcatattagaaatcagctgtacatagttatgctcttataaatggaaagtctattacatttgtgttagaaacagaatgttcatactggaattcaattgcagttgatagacacatatcaattgcttaggacatgctaagtgctgcactagatagtgtggggaatatggccataaataaaataccatccttgtcccagaaagctcaggttccaaaggcaatatcacatagtgactaatagttcaggctctgcaattagggcttgtgttcaaatcttgttttgtttcactattcacaaaccctgtgacttctttgagatatagtattctccagtaaatagaaaccataataaccatggaaacacatttgtaatactatataattctgattatataagtagtacatgttcattattaaaaattcaataatgagaaaaaaataaataaaatgagagaaggctcactgcgatttcatctccaatactgatgtaaccaccctgaagaatttagttcttacatttccagaaaattttcttatgtatatacttacattctattaatttttgggtacattttgtctgtactattttggaatcagttttttcatgagcttttttattttgaaatgattttagactggtaaaataatgcagagagatcctatttaccctttgtccaacttcctctaatgttaacattttatatatgaccttacaccaatgctgagaagttaacagttgtacattactactattcaataaatttcatactttatttgtattccatcagctcatctactaatgtcctttttcagatcccggatcccacattgtgtgtagtgcttgtttagttttatgtaacaaggcattttggatatcttttcatatctgcacatgtagctctgacatattgcttttaaaaagtgcaaaacttgggccgagcgtggtggctcatgcctgtaatcccagcactttgggaggtcgaggcgggtggatcaggaggtcaggagttccagaccagcgtgacctttaccaaaccccgtctctactaaaaatacaaaaattagccgggcgtggtggtgcacacctgtaatcccagctactcaggaggctgagtcaggagaatcgcttgaacccaggaggcagaggttgcagtgagctgaggtcacaccactgcactccagcctgggcgacagagcaatactctgtctcaaaaaaaaaaaaaaaaaaagtgcacaattttaatcaattaagtctgtatagttgtagtagtccattctcatgctgctataaagaactgctgaagactgggtagttataaagcaaagaggtttaattgactcacagttctgcagggctggggaggcctcagaaaacttataatcatggcagaaagggaagcagaaatgtccttcttcacatggtggcaagaagaagtgccaagcaaaaggggaaaagccccttataaaaccatcagtcctcatgagaactcatttactatcacgagaatggcatggagataactgcccccatgattcaattacctcccactgggtctttcccatgacacatggggattatgggaactacagttcaaggtgagatttcagtggggacaccgccaaaccatatcaatagtataatttatgtaaacctcttttgactattgatgtttttcatatgaatcctaaaagaaacttatctccatgcattgtatgatttaatcttcactatgacctgtgtctcttagacgccaaactaaggctctttcatctaccctagagtggttccctgtataacagacacaaatgtgttacttttgatatattttttctgtgaccattgacctcctccaattttagttgtgctaattttcattgtatagaagttcttactttgtgaatgattaaatttgtagatctttttatttctgatgacttgtattgttttaaagctaaggaaattatttgaatatcccagtttcaatggctaaagcaagtatttggaatcctataccttatttgcaattttcgagtttccgaataaaaatagcagtgatcctcttttgatgagtgaattagtttttggataatggttaaaaaaatgagccaacagaagatggttttacctcctatggatacagcgcaggattataaattgagattctgttcttgaagcctactcatttcataaattcataaatttaccaaaactgattatatttttttgtttggttatatttatttttgttttttttcccacctggcctggttaatagggtatatgtctgttcactagcacttctatttgggtagggaaaattccctaagtccctcaactttactacggtcttttggggatcattataggacagatgccatcaattttataaaatacattaaaaccctaagagaaaaaaaaccttctctccataagctgtaactctgtgtctaacatccattgtgaagttcaggctaggcaaagagttaaaatcaatgctatttcctacttggacaaacaaaatgaacaggagcctgagatagccacctctgagttcagcttgttgttattcagtttccattctaatacagtttcttccttgctcaatatcagtttataaaagcatgttacatgtccactgaccccagataactaaataaatcccactttatagtcatagaactaagtcccaggttgtatttgtacaaatgcctgccaaagatggatacaaggaattcagaataaatcaaccattaaattcacatttcttagtggaataaaagtaggaatgaggaatccaattcaccatcactctctcatacacacgtgcatgcacatacacatatacacacgtgtgcccacacacacacacagcatggtacattattagttttctttgttggatgcatgttttggttttggatttctttgaagggcatttatgcagagttggttataaggtttggagtcctggaccccagagaactgcatttacttctgtctttgcatgtacctttgtaacatgtacctggtgattttatgctggtcagatttcccatttgaatgaggtgacagcattcagcaagttataagtctctgagatggacatttctgcaggtctttttcatacatttcccgtagaaatcttttaaatcatgttcacaatgaggcttaaaattactgctttcttaaggaaaagggatataatccagggggtttataagcagcatttgatgaaagtctttgaaaagaaagtaaaaatcagttcattttaatgattggcaatcaaaaaaagataaaccatcattaaattctaagatctggtatactgagactgagaaaaaaataaaaacacaagctaccttataaatgcactgctgataatgtattctaggttctttctttttcagtagatcatcctgaacatattagcctcaggttgctggaaatcaaaataatggcatggtgattgttaagagtccatgttatataagggtgttctgatattgaaattaatacttcacttcttgtttctgaaaagtgaatgttggtaggttggtttttgaatgtgttttgaatattttaatagaactgggttctatctaggaggaaataaaactatctctgtggcagacaccacagttcttcttcttggttgtaaacttacttcctagtagcatcagttcaagatgtattctcatggaaatgaattttattttaatgttcagacatgctgattgtggaaagacagtgtgagaattcaacctagagccttgctctggcagtgaaataggatataaaatataagaggagactcatggtgaggtcacacgggtcctgaaatcttccgagaagtgaatcataactcattccaagtgacaggaaacaggtccgaggggatggaaaagggatatgaatcagacctgagttaaagttaacctttacaatacctgtcaaaaattactaagcaaaacagttatatgaatatcaatacatgaaatgctttctccttatttgagtgaaccagctgctctcagactcttgaacagtaaccatatctagagatgtaaattagaatgtcaattacaaatcattcttatattttcatcacattagaccgtggataaattgtgtaaattatttgaaagtaattaaatttctaatctaaaaatttagattcagagttggcatttttttttccttccccccccaccccccccccggtaaagcaccagatagtaaatattttaggatttgtggcccatacagtttctggtctctaacacaggttctcaactctgtcattttagttcaaaaggagaaacagacaaagtgcgaatgaatgattgtagctgtgctaaaataactttatttgaggacattgaaattcagatttcatataattttcatgtgtcacaaaatactactctttagattttttttaactattcaaaaacataaaactactctttgtctgtgggattatacaaaaacaggccttgggccagatttaaacagcgggctgcagtttgctgagctcagttttagataattcacagtaaccactgatttgtgctgctttggacagtggtgtaaagatttacctatagtacattttctaaataatatctaagaaaaaaagtcatgatttttttaaaggacagaatgttttctcccacaaaataattggtcgctgacaatttttttcttgctgctaacctgatttgtcagagaagtgagcactacatctttgtgttatgccctctccccaaattccaatactagaaatatatttatttggttttatgttaaaatgcagatgccatcttttcgtatgaactgccattaaagatagaggagaaagaatgtatattctgggaatctaggggcatggcctcaagttactaatttgataaattgtttctgaagtctagtgctttatcttaaaatattatgtcagttctgcattctataccactagataggtatgtttatttcagggtacacaaactgttttaagtcattgaacaaatatgcagttcctctgtgacctgccatactgccagcataaccctgaggtctgggcataccttaggttaagaaacacagcagcgaggcaaactgattgtttatcagtcccagtttgatggcttcagagcagactttaaatggtaaaggaggaattacacgtgagcatcccagttgtcttgtatagtgacgtgaatggcccctattcccttgatccatggctgctacttgcagacctaactccagcccaaggtgggagaacggcatgatcaccgtctttgaagacagatagacaacggttttaatttttactgttccatgtgtagttagactagttattgagttgaattttgtcatctgaaaaatgaaggtaggatttatggttctttagttacaatccaatgacttttgctaatataattcagaagggatatatcagaaaactgttggaggatgtaacaagggaaaattaaaatatctggttggaggaagacaaaggagagaaataagaggcaattagctttccagggcattttattgagcaactatgagatgctgtggttaagaagccattcaatttgcctgggagagttctggtttatacctgttgtacttgcataattactcaaagctcccctttcaccctcaaaaatgtctctgttcacatgacacattgtcatcttagaggactcagaagtttgatctcacttccgactgtgagttggtcttgctcttttttcctgacactgcaggatctggttttgttgcctgtgttcagagccaacccgtatactccagtatcaattctagattattccagagccacctggtgggggtatccaccgtccatgggaagtgaggagagaggtgggcaaacagacagccatgatattgaacctcaggtcctcacactattttttgtctgggaatggaattagatggtgatatggtgtggatttgtgtccccacccaaatctcatgttgaattataatcctcagtgttagaggcagggcctggtaggaggtgattggatcatgggggtggatttcacccttgctgttcttgtgatattgagtgtattctcacgagatctggttgtttaaaagtgtgtagcaccttcccactttctctcttcctcctgctcctgacatgtaagacatgcttgcttccctttgccttccgtcatgactataagtttcctgaggactccccagccatgcttcctgtacaacctgcagagccatcagccaattcaacctcttttctgtataaattacccagtttctggcatttcttaatagcagcatgagaatggactcatacagatgggacagtccatagtattttgaaatttgtcactatcccttatacacattcatgctacttcagtctaatatccatactgttactcgaaatggctttctgaaacacaattctctctaaaaccctttttgactcctcatttacatcaaggaaaaataaaacttctcaacttgacatacagagcctttgatggcctagcttctgtcttttctttgtcctcccttagttgcccacagcttccctatcttgtagattcctctaatattcagtggcctgcagtccttatggcgccatactcttgcccttctgtgactgggcacatgctgtttcctctggctggaatgctttgccctaccagccttgtgctggtttttcctttcagaatcagagtggaagttggttttcttttcttactagttctttttttaatcttctgtttgagttatccttcataccactcccataattcccttggcggacttcagttctaaaatgtgggaccccgaatttcatttgatagtttccttgtctttctctctcagtaggttattggcttcttggaggcagagaccataattttcacctctgtaaacagtggaatggtacatagcagctgaaagaaggttggataagtggataagtggtcttcatgagaaaggagtgttacttctgggaggaaaaacataaatatgcaggcagtggtgatagggattttaataagacacagagcacggtacagaatgcatgctaattttatgtggggctaaattagtgtgaatctgtgtggcccagtgaccgggcccatttcagcttggtaagaaggagaaagaattgtctgtggcctccagagaggctttgtaatttattttcatcaatacacatgtttcattttctaagtgcaaatgttgccacggtgatcagcgtctctggtttctctgggaaccctctctaaatacaacccagggtacccagagaacatggagaatagaagttggtgatctttgaataattgtggaaggcatgtgtagtcctggaagactcaataacacttcctgaatttataaaatgggaagatggacttcccagccaatgggcttggaagatggacactcactagcagaattctacaaaggattaataagtggacttttttgagtccttagtgaatccatttgggttcctaattattatcttatgggaatcacttggactaaggaggtctgtttgtagcctaatttttccttagaaaggacatctaatttactgtctgtttgcatatctgtcctctccactagctaaataattttatacacatttgtgttcttggtttccaacacagaacatggcatgctgtaatcacagagtagctgctgaaagaataggctgatgaacttgtaaaggacatttgggtggttttgaaacactgaaaaagtcaaatgagtcaaagtataacatggctatttaaaaagttatatgatctgagagagtgttcaaagaagtggtttctacactataattttcacctttgtaaacagtggaatggtacgtacgtagcagctgaatgaaggttggataagtggataagtggtctgcgtgagaaaggagtgttacttctgggaggagaaacacagtagggagtcttagacctattctattttgccctgataggactagaacaggagggttgtattaaattaatcaaactccgtaataaaggaggcattggaaagtgggaaattattgagagaaaaatgtctgggagagtcttaaacataaggagtgtattttggaaaactaggacagtaataaacaataatttttacagagagttgaactgaaagtgcctgcaatgatactaactgaaaagaaaaggcaaagtcactggacaggaagcacacagtccaccccaggaaagctgtgatggctgtggactaaagaacagacaaatatgaatgggaaacagattccaaatacattcatgaaaagagtaacagtggctgtccctgatgacaggtgatgtttttaatgactttttataataacctagtattagatgcatggtgggggggactatacatagatttttttttctcttaattcaaaaaaaatagaacagaggattcttgtgtggagaagacttagggggcagaagaggagttaggagtgctattttcaaatatttattgggtcatgatgtggaaaagagattagaattattctgcatgatttagttagaactgcttacagaaaagctagacgaagggacagtttagctcatattaagtatgtcttatgtctctgtggtgttaaaagataatttctaataaaaggcaaatttatgactcatagaataaaagtaagtatgtgttaaaaatcttacttaactcattaatgaggaaactggtgaggtattacaaccagttccaaggcaaatgcaaagaataaacaaattcagatttgcaaaatagttcccaaggagtcagaatcagatatggcgtaattttccattgaattcccaaatttcccctagagtgtctctttttgaccaaaaatattatcaaagaaatattgttctcaatctgcagcatgaactgtggtggctcctggttctacgtgatgtttggcaccaggaatgacccagaagtagccaaatgatgacctgttggggatactgtagaaaaagtttactcataggatagttggtttgccaggatgactttaaagatagttaataacctcaaaattctaagatattacctcaccactcagggagccagctcctgaacctgtatcactacagctgggtccttttacaaattcaagttcctattaatacaaacaactgtccttccccagcttatgagggtttcctgtgtttctcactgtgccttgagaatctacctgccctttggattctagttctctccttatttgtctgacattcaccaactaaactctcttctgtctcttaaagcgctttcgacttggaaaaagaaacaactgtagaagataagattatgtgggctattttaggttgaatctttacctcccccaaccaccaaaaaaagaaaaggaagaaagagagaaatattgaagtattaacccccagtacctcatactatgacctcatttggaaatagggtcattggagatgtaattaagatgaggtcatactggagtaggttgggcccttaaagcagtatggctggtgtccttataaaaagatggccattctggccaggcacggttggctcacgcctataatcacagcactttgggaggctgaggtgggcagattacctgaggtcaggagttcgagaccagcctggccaacatgctgaaaccccatctctactaaaaaatacaaaaattagccgggcatggtggcagatgcctgtaatcccggctacttgggaggctgaggcaggggaatagcttgagcccgggagacggaggtttcagtgagccgagattatgccactgcactccagcctgggcggcagagcaagactctgtctcaaaaaaaaaaaaaaaaaaaaaaaaaaaaggtggccatttgaagacagagacacatagggagaaggctgtgtgataatgaaaatagagattagagtgacacagctgcaagtcaaggaataccaaacattgctgggcaaaccaccagaggcacagaagaggcaagaaaggactctcctataggtttcggagagaacatagttctgatgatagcttgattgtggacttcttccctctagaactgtaagacaatacatttctgttgttttaagccacctagtgcgtggtactttgttacgacagccccaggaaactaatgtagggatatagacaaatttctcttctatgggctggctctgtgcattgttctaaatgtgaagagccgggtgtaatgtgttatacacatataatgcctggcaaatacaaggcactaattaagtattagtcttcttcactgtctttttttttttttttttttatcttagaacctgtaaattataaaccaagtgactgcattaccacataatgagaggaacgtgacttggaattaaatctgagtttaaatccaagctctgccactagctagctagctatatgacttagtatgacttaggacagttttttttttgtttatttgttttctggataaaaccatttttctggtcagggtaaagatgaaaaacaatggctgtgatcatgtggtacagggtaagcacccgatacttagtaactactgtaattttattcttcttgcatgatgattcttattatattagtgcttcatgacttgcattgctgctagggagtttgtaattgttatatttgctcaaacaattgaatttataatcgttgcattcataaggagaaagatgactgcttttaaaattctctttatatcctggacattttaagacttgaaaaattagtgctttccacttttatttttgaactgctactaaatttaaaggactattaatcccccatgtttatgactcaccaattcatcatcaacacgatgccttttaaagcaatatgtgactcaggagaagcatgaacgaagcgcctgaaagaatttgagggtggggagatggttgtgttgaggatgaaggaggagcatttgcatttatttttcctttgaagtagagcccgaaaagttttgctgaagaaaagatatctgagcatgtgcttgagtttgattcattaattttcagtatatcttaaacttagtttttcaaactctttttattttactatcatatgagctcacagcaggaatgccaaaccacagtgccattgtgtgaggcacaagggtgttgaggacagtatgaaaattcccttttgagtctgattttctgaaataccagaggccacagttctgagtggctagtgcaagggaaagaaatgtacccatgcctgggttagaaaggcaagaagctagttccttcctagctccagaattctcaaagagaataggcttgaagaagtctatattcctcctttcttaagacctacactaaacactaaactctttgactatgctcatgggaatatcacgtagaattccctattgcagaagatgagtagtcttctacatactgtactgctgatggtaagccgacttctcagatagcccccaagatttctgtcccctgttctacacaccctgcataatgccttccattggtgttggcaggactcatgaatatgatgggatagtcactgacttgtttatgttacattatattaaactccatcttaactgacagagagaaactctcctcctggccttaaaggagccaactggtatgtgtggagaaggtcacaggggaaggaacagtgggaagcctctaaatactgagcatgggacttgatggactgccagcaagaaagtgggaagcttcgtcctataactgcaaggaactgaattctgccaacaaccagtgagcttggaaggggcctcagatgagatcagaccatggctgacaccttaatttcagcctcatgaaaccctgttcccaaagcccacctactctatgctgaactcctaaccatggaaactgtgagataataaacgtgggttgctataagtccctatatttctatttatttgttatgcaacaataaaaaatgaatacaattccaatttccaggagcagggtatcaagtctcttagttaataaacaacaaacaaacaacaaccaaaaaaaccactctgtgcacaaccacaccccaagttgtttttgttcaagtaactcacaaaagacttctccgcctcccattatcacagactttcacaaaaccagtgggagcccctttatagctggacatggccatggcctacatgactttctagatgagcctagctgagctattactgatttcgtggagcaattactttgtgtaatcacctgtgactgactgaaagcctattgtttcacacttcttttatgtgtccttataatgattttcttaaggccaattgcaatctcctatgtatttccctaccaaagaataccttgatcttgaatgttcctttatttccatgctgcccccacctttctcccaaatgtacattctaaagggccctttcagcatattgcttatttagagtgaatacatgaagatgccttttatatgcttaggggaagaagaaaagatcatccagtaaaaatttcatattgtttttccacccaagtgtatcttgctcagataaacgggcatcacaaaggccaccctggcattcctgccagcatttcagcattccatgccccatctctctcttaaattggaaaacatttttaccgatttcttaatatgtttgaattcatgtttttcacaacatccctgatatatttgggggtgctggatttgaatatgtaacccttttcttgctaaatagtcgggtttttattaattggcttctgacttatggagctatatttacagctctgtgaggtagataaattcacagcataaaataatatcctcccaatcattcaaggcagtcagtttgcactcacacataacccagatgcacttaaaataaaggtgtctatcaagcagtaagtaacgtgatttctcaattgccctgttcgtagattgagacaagtctatgtggggcaatttttcaagagcgttaggaagggctgtctccataatatttccctactctgtccctttattgatggccaatattccatatttatgtaatgattcctctggcccctataaaaatggaagtaagccgagaaaggagttacctggtatttctcaaactgttatataaaccaagccaccatattttataattctgaaggcgtacagctctcatgttattctatgtgaatggtgccccctggtgatgtgctgtatctatgctgcagtgaacttagtggatgtatgctcaagattctgctttgtttgtacattattcaagtttttaaaaatgttcatattttcatgggaatgagtttatcagttcctctcttgaaagcatgtttgattagaaagagtgcagacttgtttgtgtggttgctttatagtgtcattggcctgaattttttttttttaaaggagctatagctaattaaaacaaaattagcatggccaggtatggtggttcatgcctgtaatcccagcactttgggaggctgaggtggaaggatcatctgaggtcaggagttcgagaccagcctggccaacacagcaaaaccctgtctgttaaaaatacaaaaatcaggcaggcgtggtggtgagtacatgtaatcccagctactggggagactgaggcaggagaattgcttgaacctgcgaggcagaggctgcagtgagccgagatcatgccactacactccagcctgggtgacaacgtgagactccatctcaaaagaataaaaaataagattagcaaaatgttgatattgaaactgcaagatggctacatggggattcactatgcttttctttttacttttgtgtatgtttgaaacgttctacaaaaaaaaaaaaaaaggttaaaacataaaaggaattcagctttagattgttaaaagcacacaaatccttgccatgtaagtcttaaatacttattatacaaaaaatccaaatgcaaaaaatgtttatgtagtagaagaatggaatatgattaaaccttttccaaaatagaagcgtgtgcttacaaatcatagcatttagccatattatgcagcccagaagaataaataagtagatactttttaatatataaaaaagaaagcgtgcagagatcaaaaagacagaagctatgtgagaatgggatccgcaaaaatgcagaataaaagtttactctttttgttttgttctcaaaactcttcctcctgctacttcttttaacagctccctgccatgatccaccatccatttattcattcattcatttacccatccatctattatccatccattcattcattcatccatccacccatccgcctacccatctatctgtccatccatttcttcatccatatattcatcgacccaacaaacatcagttgagtgcctgtcatttgccaagcattaatggatgatccagtacccaatttgaatttctttacataatacctcaatgatccagagagaaagaggacattgaaaaattatctgtcgttcagagattggagagtagtgtgcagcggaatacattcaaacttttgaagacagctttttgcaattgtgccttatacttccttttccccactttctctctccctccccctcttgctgacagaatgtacaaagggtcctagattcagtgtgtactgggtagaggtgcacagaaaattgcctcaagttgtgcaatgtggcagccctatagacttcaggaactttgttttgcaatatacatttttatttgtttcgtttattttaataagctatttttcattaaagcttcaagcttattatctctcctccagaaggctcattttctaacaaggttagatgcagtttttcttcttattgattgattgatttacaggtaagaggagtgaatgtctatatacttggtcaggttcactttgattccttatttctaagatgaattcaaatgtaatgaatctcttgagccagacaggaattcttgttaaatatcacatctctctatttcactttagtcttctacttaatggaaaactgaataggtccaaagattgcaatttctgctttatttggcataatgccgatacaaggatcaattacatcttaatgattatatcccttatacacttgattgcttaggccagtatatgacccattatgtgaagcagtcagaatgctttcaccatctcagaaagagaataacttgagcctgcacaatcaaaaatatatcaccgtaactcttttcttctgaaagatagagccatattcttttgaacagataactgaaatgagaaaagctgacattgtattactaacaaatcccttagacatttgctttagaattaagtgtgacacattgaaagacatggttagagaactgctttagttctctaccagctcaagaacataaacaatatgaactggggttagaaactccttaaagaatccatggaagagaaattcattaaataaggtaaaataacaaggaagctgccatatcatacctttaaaattctcttatgaagttgtatcttgggttcatcatgaaacagtgctcagtgaaagatttgggtgcaaaggatttattatgaatgtgcgttcaggaggaacccctaagggagtgggggaagcaaaattggatatgcggggaaagccaagcaaaggtttgcttttacctgaactcagatctatcccaaaaggtgctctggagcataacttacaagagaccatccatccttaaaggggtgcaggtactaagtatatggaaggtgggtgatgaacacaccatgcttggaaaggaatctacagggagttgcatggggtaccagtactgttcagtgcactgaaatgctgaactcaagattggaaaattttgtcagaggttggtttctgtaaaactctccaagtttgttataacacactctattctggggtcctttggaatagtagtagaaaggaaaacatggctgtggagtcagagaggcctaggattgaatcctaaccctgctatatgccagcaaatagaaaaacctggcctagagtaaatagcaccatccctaaatatatacacattaaatcagcagtgctcctcctcacacacatctgctttctataaaatttaatatttggaactttttcaccataagtcatttaaatctttgtttttgacttttctcctccaggaagattttaattttcaagcttacttctctgcaaaataatgggatttaacctaatttcaaatgattcctggcaacagagaaatacttatggtatgcttatttgtggaaacagaaagtcctttttcttcccagagtcctctctgcagatgcacctgcccactcagcctgcccacaatgcaggccctcttttcacacacccttgaaagaaaattcttcaaggaagtctaaagacaaagacaaattacaagaaagcactgcttttattttcattttttccaaattaagctcctgacctacaattattattttgtgttctttcctcttcctcaaagctggttttactttctctactgcattccctgatcctaaggtatctggcagttagtggtcagcaggctgtcaggcagctcatcatttggtcaggatccaggctaccctctgcatctctcagccaaaaccctccatgtgtaccctcgtggtttttaaaagaagacaaatggcccttctgggacccaggtagccagatggaaaaacatggccctccttggtcttggctggggtgagaaccttcttcccgagtcattcattagctcaagcttctttcaaatcaagagattccaccaattgtggcagggcatggaggcttatgcctgtaatcccagcactttgggaggctgaggctggaagataagttgagcccaggaatttgagaccagtgtaagcaacataacaagacctccttgtttctacaaaaatttttttacaaatttgcaaggcatggaggcatgcaactgtagtcccagctactaaggaggctgtgataggaggattgcttgagtctgggaggtggaggctgcactcagccatgatggtgccactgcactccaacctatatgacaaagcaagacctgtctcaaaaaaaaaaccataaataaaaataaaagaaagaaattctaccaattgcaaaacgttaggctttagaaatctttcaatcataggatattattgctggagggagctttagagatcattttgtcccacctattaatttcagagaagaatggactgaagcttacatagcttagatgttttccgcacaatcacacagtagacaatgctagcaactacacttctatgacaacaatggttgccagacttttattcatttattagcattatagcctctgttttgaaaaaaatcttgctgtgaaatataccaactggacctaattcgtatgaagtgggagatggggagcccaaaatcaaatctatacccctttcttctttttgcagctctgtgccaaattccctcttgaaaaacaaacaaacttttaatggctcttagagacctaattcagtgctttaagtttctgatgggcctttattatggagcttgattaatattgtttagaaagtcctgcacccgatcatgtgtttcaagcttggaatgtcccgtaaaaaagggaagctctggccaaacaggtcagtgtcagtttgggtccagagcctggaaagaggatcagggaagctggagaaagaaccagatagtggctgaacagagccctgagcttccaagccaagtttggagtctaggaaatagtctgcaaggccaagtggaaggggctgaactgaaaagagaatgctgagccaaggttcaggagctgggttagaactggatggaaggaaagttaagggaatggtattcattttccattgctattttttgcagaaattactacagctcaaattactataaatttggtggcctaaaacaacataaaatgtattatctcaaagtttgtatgggtcagaattctgagcatggtttagttaggttgtctgcccagggcctcaccagggttaaatcaaggtgttagccagtttttattcctttgagaagttcagtgttttcttccaagctcctgtggttgttggcagaattcagtatcttgagattatagaatggatattttcactttcttgccagccgttagccaggggctactctttgttcccacccgatgttccttgccacatggttctctccactgtagagcgagttttttaatttattaggagagcatgactttaatgcttgaccatcttttgaaagggctccatagataaggctgggctctcccaggatcatctcttttgcttgaccaaagtaaattgattagtaacctcaacatgggaatgacaatcccgtagtattcatgaatcctttccatactctaggggaggggattatacagggaatgtacaccagagtgcgggaaccttggggtggtcttagaattttgtctacaacatgaatgaagccagagagagcaaggacagtctttctggcttcaaatacagactctaccacatggaacctgaagggccttgggtggggaactctctctaggtctcctttacgccttaccagtaaaatggaattgtaatcatacttagctccggggattgtgatggagattcaatggaggtatacacaaaagttcttcatcactgcctgacctagggtcaattcataatgaataccagctttttaaacacgtggcctgtggctcacctttcaagaaccacctgcactctgttagttgtattggcttaagggttccagtcaggaaagatattttcccttttaagaaatacgaggtcatgaagcagctcagaacttctttattgggacgatgaactgcaggtgctggcgctcctagatgtcccacacatacacccagcagagcactgggtcctttctcatggcttgccttggtggcatgccttacggaggctaatggctaagcagaagattaagccttagccccaagctaaaaagggagcatcatatgttcacattggagaataagaatgaatgaatgaataaatgaataaataaataaagggaacatcagggttggctcaaatttcctgatgacatgaagtttgaattggcatctgaaagcaggtagaatttggattgtcaaagtcaggaagaaagtgttcttgataatttacgtaaagctcccaccccagggctcggcttatctcttggtttgcctaaaggcatttctcttctcacatcaggggagcaagtaacttggagcgagtaactaacgtacattgtgtcaagatcttatctaattttaaaataattaaaacctaattaatttacatattctttaagtctgccattggcctcttaacgtatgtgtgccattagcgtaaattgagatcatgcatatcaacaattgtccacttttctcaaaactgaaagcctatgtctttcttacattgaaggctatggtttatatcagcagtgtggtggatgaaggggaacatgaattaggggtgatatctaaagttccacaacagtgggcatatgtatacttccaatatggagaaagacatttcaagttgttcccaacgtccagtaagcctcatgtacatttccattttctatataacatgcaatagctcaactttgcagataccttgttaactcacttccttccccacaaatatacttggatatgaaaatttccaggtgcttgctttctttagctattcttgctattaaagttagttaaaaagttaactgtaagtgctataccttttttgagaaagctgcagctgtttgatccagttataaaagatctgtaaggcagcctcaagggatatgtggagaattttcatcagctaggcaatttatagttctgtttagtttttactagatgtcacgtattcccaaaaaagttacaacaacatcagcttcagtttattattagcatacacctgaaaactctttggaaacaaagagtcttcaaaagactcagcatgatttacagatacagtgcatgagctattttctgaggaagttagcgtggaagcatcagtggttactagtgggctgcatgactacttgaatgaccaatggaatcagacaactgttagtaacagttactggttagaggagtcgaggaggcttcctggaggaggcagcacttgggctgactcgttaaacgattggtagaagtgagataaaatggaaggtggtcgtggggaaataggttccacacaggaagaccggtgagaaaacaaggctgggcaggcaaaaaataatgttagtgggggacttcaaacaattcagagctgttggaggctgacctgtggggaagtgagaaagggagtgtaagggaggtcaggtcaaagagggaataaggtctacataggtcacaatggcttgttgggcaatttaaaggaatttaaattgggcagtttaaaggagtttgctgtgggcagtggcaaacaactgaagggttttagtcagggcagagttaaagatagaactgcttttcaggtgggttcttattagagtctatcttaaatgctgtgtggaggaaatagattaagtgggacaactctgaaggcaggaggccagtgaggaggctgttgaagtaattcaggctagcaatgaggaagtcataagcaggtctagcgtgggagggatggacaagagttaaagcacagcttctgtacttgttttcccttcatgggaaggaatagagcatgccacttataaaatgactatagaagccagactgccccagtgtgactctttaagaactgcctatgtgacctttgcaaacttccttctctgtaagataggggtgagaatactagtattgcaaagatcacacctattaatacacggaaaagcactaaagagtatttggcacatcttaggtgttcagtatacgttagtgattattgtgatgaaagagtttagccctgaaacttgcatttctcagacaaactccaagagttggaatcctgaatcagatacttgttagggtaccatggcaatttaaccatttcgttccctagtctcctcatctgtaaatgtagataacaatagtatgtacctcatagggttgcagtacgaattaaatgtggaaatacatgtaaagtacttagcaagcgacggatgtatcttaacagccaatgactctttaccactaccaccaccatcatcacctaggcaactcttttatttatcccttttactttttttgagagtagtatatggtggctactagttatatgaaaagtgaaatgctccccacatagtttggttttcttacctatatttgagttctcataatgtaaaactactctgcctgctaaattaacctcgatgtttcaagagaaaaatctatgacacatttactaatcttttaattttatatttgtgtaatacctttaacctatgactatgaagtgaaggtaaaagtgctaattttttctttattgtggctgaaattttattatgaaatatctcttggctttggtattcacataatctattttgtaggaaatgtcattattgtcccccagttggcttgctcactgtcaggaactaaggaataagactcgaatttagcacttagactgggtctctaaattgcaatagaaaatgctcaatgtataatattaccatgctcaatctattatgcaggcattactaagcatccactgagtgcttccatctttgggctaagggttatgaagatggaaacaaatttgagtcaaatagatggctgtcaaggtaggcagactcaactggcattgatgggtgattaatgagcattgagtcctgtgtagggacgttaagcactgtgattgctcagatttggcaagacaggcacttcactgcatcctggagaggcccagacctgggatcagtcctagcaatgaagcctttgccactttagaaaagacatttcctattggatggcctcagttttgctttcattaaattgggttggcactagatgatatctaagttaactcccaacttttacacttgctggttaaatgtgagacgggtactttccagaagctttctaaagaataaacaagtggggctggacacagtggctcatgcccgtaattctagcactttgggaggctgaggaaaggaatggaacaatcacttgaggccaggagttcaacaccagcctgggtaatatggtgaaaccctctctctactaaaaataataataattttaaaaaattagccaggcgtggtgacacacacctgtaatcccagctactcaagaggctgaggcacaagaatagcttgaacccaggaggtagaggtttcagttagcccagatctcacattgtactccagcctggacaacagagccagactgtctcaaaaaatatgacaaacaagtgtatcttaaagttattgttgttcttgttgttttttaaggaatccgtagctttaccctacaacatatggactctctctagtctatattttatctctggatcaactcttatcagaccatgtgtgctaggtcctttatggaataaatttccttgaactgtgctatgggatttatgcaaaaaaaaaaaaaaacaaatttgagattgtgttgattgtgtttatgtagtgaaggaaaccactgacctcctcatacagagttccctccatgaagccatgttccctgaggaattccctgaggaatatgcttctttcctactatttctggcaggtgtgcatctgacatggtctcccctcgactttgcaggctaggaatcttggcccagactagtgattcaatatgtacatgggtgacacatcctcattttattcttcttctttttcgtttatttgatattcatttttatctttgttattttttccatatcattgcatggatgcatctgatctacctctaattatctgtggatcaaaccaagcagcaatgtgtggtaaacagaaggtttaggtgccaaaagcagagtctgtgctcaggaggctgttcactcttctgtgataaaaataacccctcacgtgggtataacacatttcaatttacaaagtactctttgaatttttattactaccttgtgaagtgtgtggtgaagttctttattttcttcattctacagatgcagaaacttgaggctcagggaaggcaagtgatttgctgcatgttgcttggttttgaaaggtgcagcggtctgggtttaacaggaacatttaccagccaaggttcagcaagaggagcttttcagtcccctaatccctcattatccctaagagaggtacactgaggccaggacaatgctgatacaccatgaagtaatactctacggacaagaaattgtcctgctgatgctcttatggtataagtgtgaaaatggccttctgtagggttatctaacatattgagctcagaaaaaaggcagactgaacttggatgtcttctgtctaagagtgtgctaggaaatgccagctgtttggcacctgaaaaccttggggtccgtgggtacttgggaagccaagttcagcacagtactaccaatgagagaaggaggaacccagggcccttctatcacccagggaagatgtggtccccctctgctgagataatggttgtcatcagtcctagctagcttattggcaggtaacctacagtacatgctgaaccaaattggacagtccttgtctccacacattagttataaggtaatagagcttggactggaacgcagggctcctgtcctcagatccattcttcactccactgtcgcattacattggttaaagggccatagatattcaggcttgagaagcagtattccccctggagaaattctcaggacagaaataacagcttcctctgttctactctcattgtacctaatcctttattatgtttgttgacctgcatatacttctgcccctctatagggcaatgcctatgttctattaattttagtagcctgcagcagttagtatagtttatggcatacaacagatatttaataaaacaacatttagcttatgaattcagtatctccctgttaactttcaaaaatgagttccttggtatacttaaacttttttagtctgcctagtcgctcattgatttttatcaccaaaccaaccccacaaaacaccatacagagttcattatgttgatgattactacctgtagagatgtccttctgattatctcatgaagctacttccttctctatgtgccctcttgcttcagacctcatcatctttcatttgaaatatactgttacgtgaagtctccttattgattatctgacacccgtcttaactgagaccatcttgcaccttgtattccacccttgctgacctgcctgtcagattctaaatacatctgatgaagtcttcccattcattcttcaagacccagctcaacaatcaccatagcttcaccttgatatatcatacatgccaatggtttcctgggtcatctctcaagagaatgtattggctttagtttttgcttttgaatatatgctgaaaaaattggtcatattctctgcaatttattgatgatcatttgttatagtggcatttgccattgaaagtaaatcaattttcaggcaagaaacctgaaaaggtataacttttaggtttcagggaaagaatataggatccttgtgacgtgagagttataaaataaaacagtagaatctataatcctggaatagactgacttctgctaaatggtcacgtgtgtcctctaccccttgttccacattcattctctgtatccatagcagaagattcttgtttatatgtttttatcacgttcactcacagtaatgactctgctctttgttatttatctttgttagcaaagagacactgtattgcccttcccagggtacttgcactttaatatcatctctcagggaagggaaggctttggtggcaacttacaaaacaattgcaaagaattgtgagcaactttagagagccaaagtttttgctttgggtatccagtcattctctgggaagtagactaataaattcctgctatattcatccctacctttttatgcctgctgaactatatgtgaatcctcagtatgcatctacttgggtcaacctaaggcaaaattgtaaaaaattcaaaagcataatgagagttttagagatggaaagatattagagatatttttccaggataatttttaccttgtctatcaacatcagtgttacggtttgaagcctttatccaaaacaactgtgaggctacctctaggtactgtgagcaagacgttgggattgttagcattgtctgtcatggttataggtgagttcaaacatgcttgttgtatcttatacaacttctatcccagtgtagggagtgcctcttaaaacagatggtactcttactgctttcttaacacattggtgggccaagactattttattacatgaggtggtggcattgtatattgacaaaatatatatcattgtcaaaatccttgaatctcaaaatagggacatactaaaaatatctgagtgaaaattaaaaggagattcgaagtcacttattttctatagtttacataatctggtagagaatagagtactgtaatactactaaaaattacagaattgtgtccaaggtcaaatttaatagtgataggatatttctgcttttccatataccaactacatatctgtatcttttagaagtagagcatctcctatagtctagaatgattttacaaaatcacttcgttaaaagtatgtaggagggccaggcgtggtggcttatgcctgtaatcccagcactttgggcagccaaggtgggcagataaactgaggtcaggagttcaagaccagcctgaccaacatggtgaaccccgtctctactaaaaatacaaaaattagctgggcatagtggtgggcacctgtaatcccagctacttgggaggctgtggcaggagaatcgcttgaacccaggaggtaaaggttgcagtgagccgagatcacaccactgcactccagcctgggcaacagagcaacactctgtctcaaaaaaaaaaaaaaaaaaaaaaaaaagtatatgggaaaccataatggtgacttttgctctggatttaattctcatctgttagataatgtagatgttttaaaaatatacaaataaatagtcttggaaaaatatgcccataacttcttgaagttcataatagcaaagaaaaggaatatagggcatggaaccttatgtgctgggtagttcacaaaagcagatataaaaataaaacttcaaaggaaaatggtaataattccatggctgagactctggctgtgtaggtttaaaagataaacgttcagactatgttgctgcaaatagtttgaatgagagaaaatgggatgggccttctctgatgagcttctgggccgtgtatagaagatgaaagaagaggctcatggttaccaagactcaggttaacgtttaaaattgtctttaattctggatagcattttagagtgacctggtttattatatatacattttctattttggaaaatatatatggctataaatatttttaaattctttttttttgtttgtttgttttccctccaagaatcactacatttgttcacctatgtcagtgttttttagtatttttttcatcactgtccccttaaggagtctttttaaaacattctttccccgtaatcacctcttatatataatgttaataccacagatatactgcatatctatttatgcactatggccttttggagggccgttgtaatctttaagcttttttggcatccaccaagaatcaatttttgtccctttgaaaatgaaatatctatgctacaactgatttcctctatgcagaatatatagatttgagctattttggggcatcttctctttcccttaacattttgtgttgtagctcccttgcttacacaagagagtatacccacaagtgctcctctcttggtgtgctaaagacacatcctttgctttgcaagatcctgtggtcctgataccagaaactaggttctacatggtccacaccagaggggggtcctacacattaattcatatgcataactattaagatcccattagctcctctttcaggaacataaatgtaaagaacagagaaaaaacaataccacctggcttcttcccttccttcagttttttcctccaggccaaagtctaaagatacagccccagtttctttctttatttttcaagaaataacagttgtttagctgggctttagcaaatgtgtgtgagcactttcttgacagattctctgtaccacctcaggtgtatactacaagaagacaaacactcttattggataccatatcagttttaggtacggttttcttcactttcctcaagagagaatctgtggccactatatagctttgtatttcttttattgaatgtgtggttgcatatcagtcaggataaattaggttatgctgcagtaacaaaacaccttccaaaatcttgatgccatcatctccatctttcttgtcacatgatagatggaacgcatagtctggagggtctcaattttagcaaaggagtaacacgcataatttatcttcccaaattgttaggcagaactagtctcataatcccatccaactgcaagagaggagaaaatgcaactctacttgctgtgaaagaagaggagagttagatcttagcagaactagtgataccataggatagtaccagggttttctctattttctggattcttccctctgcataatagatggatatttcttcttcagtatctataatttctttataacttttctaccatacaaagtcttttcctttcttctcctgaatcacattctttttctcagcaatcatttaccatttgatttgaacgtctctctttctcataatctttatttttatttattttgttgatttagattgatttcctaactagattttatatatctgtcctgtttaggcactcactgtgttaggtaacctggtttattgagggtgatgcaggagtttttctcaacccctttgttggacttgcgatgggggtgctctgattacttggccagccgtgctcaacctcttgaaggagggagtgcatgagtgagcaagtacaggatccagctgtccactttgggtgccagaaggagcaggctctgtgcaggccccctggcagcacccaggttgggtgcctgcgacctctgaagtcccagagggcatgttacaatgctctcttagctcctctgttcgtggacagtggggtgttatcatctcagtgggccccttgccttgtcctgtgtggtggccgccttctaccaatgagtgcaaacggccagtgtgacagccttttctgggtacccacactcggtaagtcccaagctcttgtctggtgtccaagaagaatgaggtcacatggacccttgaaggatgttagatgtggggaattttatttagtgatggaaaaggctctcagaagagaggggagtgggagaggtgaccaggcaggcaggtaaacttccttgaagtcaggccgtctctggccagctcttctccaaagttaagccatctctcctccaaagtccagccgtccctctgaagtcaagtcacctctctccagtcaagccgcttctgtctccctgctgactgagtctgggatctttataggcacaggatggggggtgggacaagctgtaggtagttttggaaaaggcaacatttgattgataaaaagacattattcaaaaagaaccaatcaggagagagagggcacacagggatagaagttctcactttgggccgcaggttttaggctttttggcttgaaggtgcggtttcatcagggacctacccctgtctgtctagaatttctctgccttcttcctctatgaagaggagtgtgtcaagtcctttgatttctccttttgcagggagatttgcagcacacattcttagggtgactaaaagccttcaaacataagaaatggatcttatggtaccaacaatttctaggtgaattgcccatcttttttttttttttcccccttggaaactgctcattttcaggaccattctcatgagtttcaaataggatttttttcttggaattgaattctgtcaactgacccaccatcaccaagagaatgcccagctctgttcttctttgatggaaatttctctttctgtgtctcagggcttcccatatgaaaaaaagataagatgataaattaattgctaatgggagagaacagaagaaggattttcacaatcttctcttttattcccttggatagctcagaatgacataatagtatttctgactcagaagctaaagctgagactcaagaaggagtacctgggtcttagataactttttgagacctcaaagatattattgcctctttattttgctagaaattgattatttcagttgccagaggctgacattgggatcttattctcttgagctgcattagaatgagaaggcattcatccctctctaatgcttaaaagaaacttttgttacatattctttaaatttgaaatgtgttttttattattcaccacatgagctcagatttgtaaagaaacatagaaactgaagacctaatttacttcttgctctgctttgtggaaaataaagcagaaggggatgatggccaaggtctggtggcttcagccgaaatcaattgaggcttcagattccatatgaatggcaaaagcctcagtatcactgaattgcatgtctgtttcatccttacagatgggacaaaaacttgcccaaatccagatcaaaggaaccagttttgatggtttttgctaaggtctgggtgtgtttttccttatccacctctctttcacactattctgtctcttctctctctctttctctactcctttcaggtcaagtgtatagatgacctccttctcattacggacaacagtgggattcattatgcagaacatatctccctgaggcagagtgtgtgaagccacccaagcttaacatctctggggcaggaaggggatgtgctcaggaaagcctttgtgtccagactgagctgattggctaatatgcatcttgcctttggccacctcatgccatgaatatctaagcaacattgggtttttttctcagggcagaagcagagagatggaagataacagaatggtgtttgttacccatatgtaggatgctatttacataaaagccgcagaagctatgtgatttccatgcggtccttaccgttttgcctcagctgggtacctgtgcaggccagggtgactggctgcaaatgagcttcctacttgtctcaccctacacagctctgcctctccccattaatgctccccatctggtcctcaaagcacctcaaataggtccaagattaactctggctgaggggaggaggtcatttttcaaacatggttaagcacgtggcaggggctgagaatatcaacttttctttctcaggaacatgtgaacttttttagtgttaagcaacacctgaaaactattcatcttaatgcagagttagtttataccctgagaaaacaggattaaccattcacagtcctgatcatctatgtttagttctctctgtagtctttggaagttacctgccaaggacagaatttggtctcaagtgagcaagaaatacagacaaattaagtgccagattccacttttctaacaacggtaaattaatagtccttacctaatggtgttctttttacttgagttaaggcataactgaagttttctcttccatgtgaaatcagaagagatttttatttctttgcttcattcctctcatgaggggtaagttaagttttgtttttggtagaaacttctaagttccaattgctttctctcaccccacccctccccagaaaacaatcctcctgtttgtctgaaatgaagaaggaaggcaacttggtgctgcacagaaaggtaaaaagagatggatgggaacatttgtttctgaccttcagcgaaagaattcagttaggcactataaatttgttttctgcaaatgggagagcataagtgtgctccatcagggtggaggaaagcatttgcacccaaaacatggaacacaaaataaatcgatcaaattaatttttggctgtcagccctggaggctcatttcccatcagcagtatcaggaggaaaaggagcagttaacttgtaatgattggggaaggtggggaccacggatggatttgctcaggggcactgcaaagggtgccttgctttcactcttcccaccaagaatttgccttgtctgtaatcacagtggtctgctgctgccatggaggaagtatgtaagttgccctggggcccagctgtgcactgttctgctggccccagtccttgaccttatctgtaggagttactcctttgagttaaaggatgacaggaccacttacaggcgtctattaatcttgtgtaactgtataccttttgccaggcaaggaacattcctaggggatgggtgatgtcaaggaagtgttcattgaggaacttgtagagagaatgtctagagccgagagtaatattggggaatcctgccacaaaatggtgctcaggacaagttttgggccacataaccccaaatcgttttaataacattggaggctttttgcattgcatcaacactgagtcattttctggacaatatttattttactgtttgttgcctaaacttggtctgcatgattactttactgatccaggaaactcattttatgatcagagtgtattgaaaacattggcttgtcagtatggatcacactaaccagatatttgccagaattcacatccctaaagtatgctatttctagggattacaagtaaaacaccttcaggtgacgggcagtaaatgcaagcatttgctccaaggcaagacaccagacttgccattagactgcagatagctggaaatgctgtccttcactcaaagacatttatattaaaagctttgaatttgatctgtgatttgacaatttgaaatctcaatggattattgaggtgattcttcaagcatatttttcatattcagttaagtaaatgatgaaatattatttagttaaaagcagagtgagctgatgatctctagtggatgtggaatgttataatggaataattggatcagtctggtcttctggtattggaacatcatttccccaatctgtcaagttctccccttcttcctacacccacagaagcacagattttggttattacactgggacgtctccaactgtccaagaacattccatgtccttcttgtctttatggatagaggatgatggatgatacccctgccccaacatatacatcatggatattagacatgttgaaatgcacagaagttatattctgttgagtttctgcctaaacctggaatttggttggctctgcttcctggttgcctgtgatactcagtcttcagctggtctgcagtgtcgggttcttagtgatcactattcatctcatcaataattattatatgaatggcatgttgtatataccataaaaacacacttaatgtgttttttgctactagattctcaaatattcttgactatttatatgagtaaatgtgaattagttttaggaaaaatttgattcctgaaggaatctgtaagcttctttttgttaaaaatattttttaaaaaactctatagcccattatttgcctttttgccttagctctcaaggaaccaaatctaaacctagtatctgattgtaatagacttatctgtgcattttcttttcctggtttctgttcacttccacccctggataattaagagggtaagataatttacttactaacacataaatgggatttttttttgaaatctggcattgcttagaagaagggaatccacaattagtaagttttcatggggcagtgaaaaatatgaaacacctggagcttgatttgataagggaatacaagaataaacacctctctttctcttttgtgtgtgtgtgtacgtgtgtgtgtatgtatgtgtgatttatattataaaatcaaggagcatctgagatagaaaaatgtagctgagaaagccaaaaggaaaatgctgtaggaaaacagattagcattgtgaagtcctagaagcattttttgaacactatcatggattgtgctttgtgctgatgaaacaataaaacacagaaacgcattgccaaatccagaccgaaaaagtgacaagatcattggactggtacttagggtgcctggttttgaaatctggtttggtcactaatgaacagagagagcatctttgaaaaaaaatcacactctaggtttccatttggatgctctctacacccccttctagttttcacatcatgagtcacttaaaaatgcttccatattgcataaatattggcaacagcattgttactccccagcatgtgcctgggcacagctctgagcaatagagaataataggtcagaactaattccttgacctgatctattctgacctcctctgaattccacgtcctagaaatttttatatttattcaaaggctgacttttctgtttggtaatatttcccttagattgtagaggacaactacatgctagtatctttactttcctgctgaaatagcccatagcacagtagtttgggaatagctctactgaacttattgaaataactaagtcctaagaggctcagctgctcatcagatgcagacccataatggccaggtgtcctcactttggggaagtgacaccagagaccatcctctggaacaacatgcagtggaccacatcaggagactggtcacgcctgtcacaccttcaccacatggtgcattgtccttcatctttctaagatggggtcacatcattgatccactgttgcttagaagcctctttcctttcaccccacagagtggaacaccccctgtgtttccctgatttcctcatccctcctcctccaggaatgctgttaaaatagaaatttcagctgagtcactttccaaagtgaggtgtgagaccaagagggtgtgtgtttctaagcagctggctaaaagatggtgaatgaactctgaatatactcacccacactagagacataaagggatcaataagcatatactagatgggacacatttttggagaaagctgttggtggcctgtgccatccccttttcattatcaaaaggaaataggccttgatagaagtgcaaggagagaactggaaaaattcccgacctgccagcggggaacacagagaaatagggtttacttcaggctgagggcccttgtcggttcaggtattataacaaaatagcatacactggaagtcctaaacaacagaaatgtgtttctcacagttctggaggctggaagtccaagatcatggtgctagcatggtcgggttctgatgagggcctttttccggagttgcaggtggctaactccttactgtatcctcaccttgcagaaagaaagctagtttgctctgtagtttctgcttataaaggcactattcccattcatgaagactccactctcatgacttaattagcccccaagggctccacctctaaatatcatcacattggaattagggtttccacatactaattttgggggtattgtactgagagactctaaagagcaagaagccggctgcacctgcttccacattgattcggtgaaaagctggctgcattaggattggcctacactgccagagtttgtcagtaaaaaagagtggtattttctgtgagttgagaggtttggtgtggaatgatccaaggtcctgttcaagagggctgtttggagagtggataaacctcagtagaaatattgaggtattactacatggccaggggctgaggcaggggtaccaggtgaatgaggatgagatgcactggccctcagtgagagaaacaaatcactgatgagaaagccagctgtgagcacccacgaagccctgacagcccttgtgctggggccgcgtccctgtgtagtgagcaaagatgttccaatttccccattcttttctcccttcctctacctaaccctggagaccagttagtaagttgagggaacaggatttgaggctaccaagtggaagaacaaaagagaaactgagtgcctcctcgtacctgctatactcaccaaagccccatacagggaaggagatgggagtctttatttccaaacaaaatgcaagttttaactcttacatggaactctatgtagaatcattgctccctgatccccccacagttgctcacatcctaatccctggaacccatgaatatgttacttcatgtggcaaaggggaattaaggttgcaaatggaattaagatttactaatcagctgaatttaaggtcaggacatgagcctggatttatccaggtgggcccaatgtaatcacaagggtctttatatgtgaaagagggaggcaggagagttagagtgatgcaaggagagaaagacttcactagccgttgttagtcttggagataaaaaggagctaggagccaatgggggcagcctctaggagtgggagaagacaagggaacgaattctctcctggagcctccggaaaagaatatagcactgctgacaccttgattttagcccggcgagccccatttcaatcttctgaccttcagaaatgtaagataaattttgtgatgtctgaagccattaaagttgtaatttttaacagtagcagtaggaaattaacacactaaataactaaatcaaaactgcattacttcagaagaagcagaaaagtcataggtagagaaagaattagcctcaaggagtaacttaaatgaagagagggagatcaaaaaatgaagtcactttaagaatatacagccccaagtggtttctcaacctaacagttacatatctaaatcaggttatctgtccatatttctttctagaagctccccacaaggccaacctggatcctgtgtttctcttaagtgtgttgtgcattctctggttctgaacaaaggtcatgtccaaagtccatattcggaaacagttttcatggagctctactcatttgcagagagagtcagctctgtcagggtgattggtagttagtgtgagcctcagctgttctcaaggatcctcaaaagagagtcttaatgagtgctgcagtcttctgtagcaagaggatgggagctgtgatgtgtttgagcaataaagttggagatccaagttggggtcagacagtggaggacttcagatactgtagaaaatagattgcatttaatttcaataattagaatgtgtgttgataaacatttgaactgtgaccgttgcattgaaggggttaggaataaagcggttggagatatcttgctgttaaaggtgacgggactttaattgccgagtaggaatcttagttttctatcctggagatttttgtccccgcccaaatctcatgttgaattgtaatccccagtgttgaagaaggggcctggtgggaggtgattggatcatggggatggtttagtaccatccccttagtgctgcttgtttaagtatgtagcacccagcccccacttcttgccagccacgtgaagacggcttgctttccccctcaccttcctccgtgatggtgagttccctgaggtctccccagaagcagaggcccgtacagcctgcaaaaccatgagctgattaaacctcttttctttataaattacccagtctcaggtatgtctttgtagcagcgtgagaatagactaatacaatatgtcattagctgatagtgacactgagcaggagaagacggggtcctgtggtgcatatgttttgtggaattcatgcatttggggtgattgtgcactgctcaattggagctatcaaccaactcagaaaattacataaaggtaagagtgagaagccagagtctgggataatgagttgtgtattttcaacccagtaatgaaaatagggtcagggtgaatgagatcatctaacaaggaagtattgaataggtgccatacctgtgtattagaggaaaacatttatttaatgaaaaaaaccacttgtagcaatcttgaacatgtcaagcagcctcagtgggagagcagaattcaaatacatgggtgagcagaaaggaaagtgaagttgtaaatgcaacaaaggctgagtaaatatgaagtcggtcccggtgcatggagagaggcaacttttcatagaataaaaaaagatgtctatgagctgtaaattgagagaagaaactccgtatgaatgactggggcactggaaagagaagcaaaaggaggaaaatgttagtgatttggtgataatgttaggcctgcgtgaagagaaagttataaggtagatggaaagaggaagataggctacgacaattcctactgctgatattaaacctaaataacagtatttatgccaccatggggtcttttctattgcagtcctgagtgaatgatggggctgggctctacagcgagctcggctcccctgttgtaagggtgtaagtggtacatggacatgcagccagcagcttgcacacaggaggggctggcgtctgttgtgttctcagtatatttcatgctaaggttaatacagaagaggcaggagatggtccctgactttgaaaagttgataatggggaaggcaagtcttcacagaggacaacgttttaatataaccaatcttgatacaaattctttacactaatgtggtaagatttcagagtaagggaagattacgttgccatacttaggggaaattggttgaggaaggcttcctagatgatgtgaggcatgactttgaccttaggataggcagaggtagaagggtgaatcatataagcaaaagcatagcataagactttttgctcttggcgctgaggagttgtcatacctgcctgtgtagtcctgacaaaagcatagctgctgatggggatgacaggccttcaggagatgtcctgcagggaaatagctggggagagggactgtggcacagtgggaggagcactggtttgggagacagaccattgaatattcctggctctgaacctgaccatttaggtgatcaggggagatgtacttcacctccaagtgttctcatctgtaaattaggggttagaagaggtacctcataagatagtatcttgtatatcctcctccacattccttgttctcttaccttgaatatataatagtgggtgtacgctttccttttcagaagaatctgactccgcctacctgctctttctcattttcttctgattcatcttccaaacaggtgtgcaagtgctctttaggtgacatttgcccagtggtcactcacctgcttaaagttctgcccattgcctacaggtgaaagttgttataacatctttggtgctgacttccatcccagccatattttctgctgactcccctcttgcagactagtcacgttgaactacttgccaatctccaaataccccagtctctttggccatggctcacattctttcttcttccctagaatagtctccctatgccactagcccctaatttttgccattacctccttccccatcttagggtctgccttgttgtaagcctagggacctgtgtatctttgaagcttttcctaaacaactgccctcatacatgctctctcacacacaaaaaaatgctctccacccacttggtggtcccactctgacaagcatagatctctactgtagcacgtttgtatttgacttcattcgctcttttatggtctgtattatctcattagatgtctcccccttgccacccccacctcatacttttaagtttttatttacataggtttttggggaacaggtggtatttggttacatgagtaagttctttagtagtgatttgtgagattttggtgcacccatcactgagcagtatacacttttttttttgtatgacttccagaagcttatgtggtgattaattaaatgtggtgagtgagtgaatgaagcagaagacaagcaatgtcttctcactctttcctcctctggtagttcctgtttgtgctggggcaggattgcacagctagagttttttttttttaatagcaatttttgctaccctgcctccccaacacacacagtctcaggacccctctcctgcctggttggatgggctcagtgtgctcaagagagaatccttgcctggcagctggagtctcatagggcaggtcccggaagtctttggggcctctttcaatctgaatgatctggatttccccttctgtgttggtgatgccctccccagtgactgtgaagtaagggagaaataactactctggtcaagttcagcgactctgaatctgatttggcttgtatctgggtaactctcaggagcaggactggcctcaggcaaaaaaacaaacaacaacaaaaaccctgaattcagctaagcctgactttccaatttccccctcacccatctgctctctaccctcaatatcaaatgtttgcttttgttttctctcctatcgtagcctgtcccttggaaaatgtattttatgctagggtttttctggaggggccttgatcacactcatcatgtcagcttttcctaagcccctcttaagagagtgactgtaacttgaagttgaaaagctgcctcattggtgctccatgatctgtaaggataatgactaccttacgcgctggcaggattgcataaggtgcaatacgtgtgcctgggacctgcaaacagactccaggttcaaacattggctctgccacttattagctgtatgatctgggcaagctattaggttggttcaaaagtaatttcattttttgccattgaaagtaatgtcaaaaaccacagttacttttgcaccaacctaatactctcttagcttctggttattcatctgaaaaataaaaaaatctgtttaatgtttgtggtgagcaataaatgagcatcatatagggatctctagaatgtgctttgaagttaggccactatagttcaaacctgcattttctccttactctggtatgacctcagtaaatctactgaacttctctgtgcctcgattttctttttcttttctttttttgagacagagtctggctctgtcacctaggctggagtgcagtggtgcgatctcagctcactgaaacctccgcctcccgggttcaagggattctcatgcctcagcctcctgagtagctaggattacaggcgtgcatcaccacatctggctaatttttgtatttttagtagagatggagtttcgccatgttggccaggctggtctcgaactcctgaccttgtgatccgcccacctcagcctcccaaagtcctgagattacagatgtgcgtcaccacgcctggctaatttttgtatttttagtagagatggggtttcaccatgttggccaggctggtctcaaactcctgacctcaggtgatccgcccacatcagcctcccaaagtgctgggattacagacgtgagccactgtgccgggcctctctgtgcctcaattttctcatctataaaatgggaatgataatgacagtaccttcttcgtgtggtgttctgaggataaaacaaaaaaagatagagcttataaaaaagtgtttgcacagttaaaactcacacattccaactcttgcgtcatttcaggtgctgtgagaattgaataaaataatattagaacttttgaaagtaccttaagcactgcataggtatccaggatttccttgaatgcaaacttctctaagaatcctgcaagaactatggagttttaaaaaaaatccttttgtcacccttctaacattttttgaaatttgggaggtagtagaatatggtcattgtacaaattgtctatggacatgtctgcatttcaggggaaaaaatttgagcactatgacacagttgatggcaccaccctgagtgctcaggagaatgtgctttttgtgtcaaaacacaaggtctcactcttacccagaatattcatgaaagatgatagtaattaggactttctaattaaaagtgtcagaaaaaattctcagataactcactttcatagagttgtaagaagtgatgacatgaggataattttttaaaaagaaagcaaagcaagtgtagtatgggggaattcctgttggctggactttagaaaacagggcactatttgtcaaaaagtgaagcgtttgtggtaggcctgtgagtctcagacttgagcatgctttggagccaccagaagggctaaaaacacagatgactgggccccacccccatagtttctgatttctgtgtatccggggtgaggcctgagaattcgcatgcctgataagttcccaggtgatgctgatgctgctggacttgtgttagatcagttttacctgaaatctgctttatcttaagtggcagctggggagtcttttagaaacaggaattgtcaggcccattgcagagctctggaatcagaatcttctggtgaaatgtaggtttagcaagcacaccaggtgattcttatgatggggcaaagttgggagtcattgggagagagaggacatctctgaggcctctccctggttggcctctataaaggagaaagcaaagctgatggacccagaccaatgccttagaagagaaagaggcactcatttacctggaaatactctaactgaatttaaagtaaatttaaatgaaatttcaaatagggagacagttctccaccagggctgcatattaggattagctggagaggcttaaaatgcccacgtcttgtccatacacaagggcgagtacatcagaatttatgagtgtgggtcccaggcatcaatatctttaatatttctcagacattttcagtgtgcatccaaatttatgaataacagaaatatggaagcttgtaacttggtctccattttgcagcaaattagctgcatgaccaagggaaaattttcttatagaatcaattcttcttggtaaatggatggagatgtggggcacatgagaaaggaaatgagagtttgtttggaatagatcagtggttctcaaccttagctgtatttttgttgttgttgtttgttcgtttgttttgagatggagtctcgctcagtcgcctaggctggagtacagtggcgtgatcttggctcactgcaacctctgcctcctggggttcaagcaattctcctgcctcagcctcctgagtagctgggactacaggcactcaccaccatgcctggctaattttttgtatttttagtagggatggggtttcaccgtgttagtcaggatggtcttgatctcctgatctcgtgatctgcctgcctcagcctcccaaagtgctgggattacaggcgtgagccaccgtgcccagcccttagccatacatttctaacaagcccccaggtattgcccttgctactggcctgtggacaatgctctgggtaccaaagctgccgtccaaactgtctcacactgaaatgtgagcccaactccacacttcaggcatgatcatgaatctcatgggttctaccacatagaaggtgcaacccccaccaaaaaaataaataaataaataaataaaaataaaaataaattactcattccagagagggcttttttcttcaaagtagaccctttgggagtttttgcccagattggagggctgctgcctctgacatgtttttacactgattcttcgtgagtctctaacatattctttggaacattctcaaactttgtagctcttcagtccctgaggacagattagacttttggaaaagctgtatctggtggaataatgaatggtgacataggggttatgtaaacataaataaacaagtattaagagatgagaaataaaaagatccttctctttgaagaacacaaccagaaaggaacttgggaaatacgagcagagatggcttccttgatcagtggcaaagattgctgggattggagcatctggggcaactcatgtcctggtgggcaggcagacaaacaccagagtagtttttataggtataccatcatactttggggtcagccaacttttattggtaagaatagtaactattttcagatttgtaggccacatggagtctcacagatttttctgtatgtaggtgttttaaccgccctttataagtgtaaaaccattcttagctttaaaaccatacaaaaacgagccactggctatatttggcccatagacatagattgttactcatagtttataactaaataccaatggaaaagtatatctatgtgtacataatctgttgtgaaataataggtattaagacatttgaaagttaaattttctgtcttcagggaatgctaaaacaataattgcaattattgcttatttaactaagcacttacattgatgaagacctccaaatagttttatagccctcttttgttctctccctttctctaggtgcacctgaaaaatattattggtgttcacacaatgagtatgcttgctaaacttggatcccacaaaagattgcagagcctatttgaggcaacagcctggggttaaataacgaaacagccagcctctagagcacaaaactaaacagaagcaagttacatagaatttcattgcttgcttctctctggtactattagtcagaacaccaacttaagctttatttcacgtagcagattgaaaggtcagactggccattcacccagactgattcagcgaggggggtaaaaatgacctactgaggatgagagtaaaacatttcacttgtagagagttgctaaggtgaggcacatttgaagggcaccatggggcttggcctgctcctacgggtgttggttacaagcataactttggctcggggtttgtgtacacttctgaaagtgcagctgcgcctttcatctagagctagccatggtctcctgagagcctgaaggtgaaagcaaatgcatctgtggtccactactgaccatggctctggactgtgagggatgcatctgctgcccaacaaggcagcagtggttactcgaaggtcaccttggaaaaaaagggactccatgtggcagagccctttctgagagggcgtgaaataaccccaggtgacgtgaaataaccctcctgcccacccccggcactgctctgccctgctttctgagcatcatggaaatattagatttcagagctgagcaaggagctgttgcaattgcagccctcagtagcagtttgtggcccataaaaggaagagttgtagggcactcaacaagggagcttccagctcgggagagacttgtgagagcactggttatcaatgaaaaccaggaggccttgtcagactgtgtatgtgttttgcaggacacagacaggaagaaactaatagttgcaggtatgatgaaagtggggagaccttcctgatgggttagtgacattagatagccaggaaacgttgttcataagtggtattaagcagaggagaacttgaagcaggtgtcaggaaccagagtatgaagtcatataaagaaagcagaactgggatgagcctgaccacgtgggaggaggatttgagagtatcagagatggtgctgcaatacttggatggtttcgatagcactgtttaatgagcctaagacagcagatatggagaactctttgattttttccctctctgatgactgagggatctggcctaccacctggtctgggaatggatgggattgctcccaggggaaaagcatggaaaaagggagctgtgctttgcacccaaagaagcttgaacttatacactaaggagagaattaaaacttcatgagagaacatgggggaaaatgcaataaagatctgaaagaaaagaagaggtggcactagagctcaggtaagatggagtgaacaggtttgaggggttgagcttggaaagagtccatgaggcaatgcaggtaataggaggcaggggttacaggttctgagggcagggagggagctgttaaggggaatgagttggttcaaaggtcatttctttagtcagttccctggtgcggtcaaggacagcagtcaggttgtctcccctaccccatattcccattgctgtgatttacttaggaaccctctggagttgtgacacaggttcccaggacttctccttcgggcagtaaccattgcagtggccagaccaggtgtttaccaaggggccaatgaggactagtaccttctattagatatactctagggctttgtcttgggctacccatacagactgctaaagccaggaatggagcagtaagtgataaggaagtggatatccaagaaggatacggccacagatgaaaggctgcacaattggcctcttggttagagaggcctctagagtgatcctccagtttcaggaagaggttgttgatggtgctacattgagaggtaagccagatggcagtactgactcagaattgcttctctgttcacctgcaaacttcttttgtcaatgtttgggatggtggagaatatcctagaggtccttctgggtcttctgctccatgcctatctcctcctggttttttatttgtttgtttgttttctggccccagaactttgtgctttaaggagacctgggaggggcacatatttttattctttaagaacctgtgcttctcctcgatccacttaactttgattttacttgtgtcataaatactataagttgatacttctctcatttcctgctatgacgatgctttggcatatttgacaggtctgaaaaaattaaatggttaaatctcaccaagttttcatctaaactgggggttggcaatcttcttctgtaaagggatagtaagagatcttggcttgtgggtcatatggtctctgtcacaactacccaaatctgccattgtcatgcaaaagcagtcataggcaatatgtataaaagggtaaagatgtgttccaatatgactttatttatagaaacaggtggtcagaggaagaaaagaccaaagaacttttagatagggttgacagagtttaaggaaaaaactccttgtccttatgtatttccccaaaagcctgcctggggagcctgaaatttcaacagtatatggtagtccccccttatccatagttttgctttctggagtttcagttaccagtggtctgaaaatattaaatggaaaatttcagaaataactcatacattttaaattgagtgccattctgaatagcataatgaaatcttgcaccctctagctccatccaccctgaatgtcaatcctcctttgtccagcatatgcactgtagaggctatgtgccccttcgtcacttagtatccttcttggttattagatctgctgtagaggtatcccagtgcttatgttcaattaacccttattttacttaataatggctccaaagtgcaagagtaataatgctgggatatttttacaattgttctattttattactagttattgtcaatctcttactgttcccaggttacaaattaaactttatcgtaggtatgcatgttcaggaaaatacattatgtatatagggcttggtactatttgtggtttcaggtatctgctgaggttcttggaaggtatttcccatggattagaaggaactactgtttggtttgtgtgtgtgttttttttaaagctcgaaagggctcaggaacatcttaattagattaaggtgttatattacctaggagaagaaaatatgaccttagtgaatagttactttgattaatcaattagcatctttttctaggtaaaccaacagcgataagaaagagctgtaccccagaggtaagggcagatgggagcaggaggtaagaaagcacccatgacagggaggctgccttggaactacgtttatagctactgtttacaaggtcttgaacggggagccatgggagccacaaggatgaaaataaaaatacaaccattatcctcaaagatgtggaaatttagttgaagatacatgatagctatgtgtgtatctttgatttatacatctaattccgtgtgtaggtatcctccatccatataataaataatggataaggcaatagtatgtggtaagttgcaatgggtagcacagccagtaagcctgaaggtgtttggaagagatctatttctactggttgtgtgaatgggatgccttcagcaacacgtggattttgaattgaaccttggaagattgctagtttaattggcggaggcatcccctccgcaaaaaaaagaaggcaatgtgggacataaactggggactcctgactgttttccttattctgtgtgaagcgggctgtagtcacagatccaatattggttaggatggttagattcatcctgcattgtggatatggccttgactccacacttccacttgtcatctggaaatgtaggagaccaggttttagagaatagctgcacttacttattcatctggatcttcattctggaaacgttccttggcttccgttaaatgtcaagcaccggatggttcagtgcagccctcctgcattgccagagatggatcctggagttttcatcctgctaatatgcagcccacatatatgaaggtcaacatgttgtattcactggaaataagttgagatttcatttacttacatgagatgctgaaaactaagtaatagtggagagttgcaaggttttagttcctccatgtaaagatggagaaaacaaaatcccctgatgcctttagtaattaaaagggcattacattcccggcatggtttaaggtaagacatgataagcctctcctatccttttcacataaccacacattattgatgagccagcatcaagaaggcattaggtgatgctttattgtattattttaagccactgaggtttttatatatgaagggcatagatttatgctgagtgattcagctatgaagcgggcacatcaatttgttcatgaatgtgagctggtgattacctacattaaagtcaccagggcagactgatcactttaatttgggcagaggcatgcaaacagcatttgctagtggtgtgtgtatccctaagaacacaggcaaaagagctgctcttcatcccagaagagctctagaaaatgcagatttgtgtttttatagatgtataactgtagtcaagggtacaatgcctggtgggaccatgaacaaatttcttcgttgtaccatgtggcaggatgttgtataaggttcacttgatattagctggtgtatgctaatttgatgataaacttatttgattaactgatacagaaaagttatacttcctcctaattctagatcatagaactgagtgccctcctatgtatgactaagttatgacaaattgagtggtcttctatacaacatgaagagagtttgtgggagttagtaaattcaaaaaattggaattcagcaactgtgatcccagatatgtgtggaggggtaaagtagggattctgtcctgcaagaattcagtctagctgggaaaatgtgaagtggctacttgagcaatcctgatttgcacttgtggtttatagaacgaatagttagaaggacattcggatgatatgttggtggagaagtcaagaagaaacagtgttgaggaatatgggatgcaatgctggtagcactggaaaattggcaattcacttattccagggacctttcagcaaggactatggtcacaggtaaacaagtgccataacaattttcctgatgcagaaatttcacttccgacaggagcaaaaactagatgcctaaagatgtgtattactttgtttttggtaatagcaaacattggagactcccctaaatgcatgacagcaaggaattaatttaccaaacaatgaggcaacaacattagggaatcttattcaataattaaaaaatattggttagaagtgtatataaaatctataaaatatttgggatctaacgggttgaaataagcagtgacaaaaagaattataacttgagaattgtaactttatacaaaactaaggggtaaactacgcaagtgatcacatagagctcccttcggtttttatcattgtcttccccttgtttcttttgtaaaactcatcacaatataaacttttaatgcattactttgctaaattctgtcttcccaccaaaatataagctcatctagggcataagtaatattttacttgtatcttccatgtctgtcatatataggcactcaatatttattgaatgagtgatcaatgattggataatgtcattcaaatatattttcacttttatagtgacctttcaataaattgcatcttatggcggtaacatttgtcaagtcattactgggtgctgggttaactaatctcttattgcaacattgtaatattttatatttatattttataactgagacacaattgaggctcagagatgcaacacgtctcacccagctggtgagaataagagtcagaacataaaccctgggctgcttgactgcaaaggccaggtcttaccaattatgatttttaaaattaaactatatagaatgaccaagagtgccagatgccttatagaggtcatttaaaacagaggcaagaaaaagtgattccacttcctcctgtcccccagtgtacttaagcccccagctgctgacatccactgagcatccttccctgatcaaattatccctgctgtttaagtttcctctatcctgtagaactgcagtgactgttaatcaggctgataaacttatgccagtgtgtagctgctcattttaaaatgattccataatacctcagcaggaaagcgagacaactcctacaatattcttctgggcagccagacttgactctcctcaagtccaattttgatggtggccatttagcctattcctatgcccatcttcctggaagctgatcatcgaaggctgagcctgtttttctaccagctgcttctgtcttgcctctcaaaggtttcagggaggtttatcatttccactgttattgaattgtgaaactccatctgtattataggagtcatgttctgtaggaaccttgtggttctctagaagataggcatatatgttaacatcttcgtgtgtactaattacatcagcacagataaatgaataaaccttcagatggagaccgcagcacttttcattgtgatgatagttttagagaaaaatgttttgcgtgaaatctgtgccaccatcctctctgtggttttatatggccacatgactgactataaattcaagtaattccccttgaatttatttaaataaattcattttattctcaaatttacagtgatgatgaaatattaacatgaggagcaagtgctttatggaccttcgaattgctattctgctttatttcaatagtgtgttcttaaaacaccaatatgatacctgaagctgtaaaaattaatgaaatgattcagtgtttgggagttgaatgcagtgaatatttgctggtgtttcaaacagaacagaatcacaaatattaaaaaatgtaatttgatttccgaggccagaaaaagggaaaatgttctcatttttctgatgtacttcatatcacgttggagttaaatgcctaaatactttattagcagaggtttttaatgtctaattgaagctcagccttccaggcattttggcttttcttgtgagtgttcaaacaagactgtggctcttttgagacagagctgcttttctgtggcggtgtccacacaaaactgaattgtacagccacgatgtagtttatcaagatctgtgagctgtgtggggttttctttgtgtgattaaaaaacatcttgcctttttaaatggtcactatacattttactttaacttctgggatacgtgtgcagaatgtgcaggcttgttacataggtatacatgtgccatggtggtttgctgcacccatcaacccatcatctaggttttaagccccacatgcattaggtatttgtcctaatgctttccctccccttgcatcccaccccctgacaggccccagtgtgtgttgttccccctccctgtgtccatgtgttgtcattgttcaactcccacttatgagtgagaacatgcagtgtttggttttctgttcctgtgttagtttgctgagaatgatggctttcagcttcatccatgtccctgaaaagaacatgaacccattcttttttatggctgcatagtattctgtggtgtatatgtgccatattttccttatcaagtctataattgatggacatttggttggtactatgcctttgctattgtaaatagtgctgcattaaacatatgtgtgcatgtgtctttatagtagaatgatttataatcctttgggtatatacccagtaatggaattgctgagtcaaatgatatttctggttctagatccttgaggaatagccacactgtcttccacaatggttgaactaattacactcccaccaacagtgtaaaagcgttccttttctccacagcctcgcaagcatctgttgtttcctgacttttttttttttttgaaacggggttttacttttgttgcccaggctggagtgcaatggcatgatctcagctcactgcaacctctgcctgctggtttcaagcaactctcctgcctcagcctcctgagtagctgggattacaggcatgtgccaccacacctggctaatttagtatttttagtagaggtggggtttctccatgttggtcaggctgttctcgaactcccgacctcagataatccactcaactcggcctcccaaagtgctgggattacaagcatgagccaccacacccgccctgtttcctgactttttaatgatcgccattctaactggcataagatgatatctcactgtggttttaatttgcatttctctaatgaccagtgatgatgagctttttttcatatgtttgttggccgcataaatgtcatcttttgagaagtctctgttcatatcccttgcccactttttgatagggttgtttttttcttgtaaatttaagttccttgtagattctggaaattagatctttgtcagatgggtagattgcaaaaattttctctcattctttaggttgcctgttcactctgatgctagtttattttgttgtgcagaagctctttagtttgattagatccaatttgtcaattttggcttttgttactattgcttttgctgttttttagtcgtgaagcctttgcccatgcctatgtcctgaatggtattgcctaggttttcttctagggtttttatggttttgggttttacatttaagtctttaatccatcttgagttaatttttgtataaggtgtaaggaaggggtccagtttctgttttctgcatatgactagccaattttcccagcaccatttattaaatggggaatcctttccccattgcatgtttttgtcaggtttgtcaaagatcagatggttataggcatgtggtgttatttctgaggtctctgttctgttccattggtctatatgtgtgttttggtaccagcaccatgctgttttggttactgtaaccttgtagtacagtttgaagtcaggtagcctgatgcctccagctttgttctttttgcttaggattgtcttggctatacaggctcttttttgtttccacatgaaatttaaagtagttttttctaattctgcaaagaaagtgaatggtagcttaatgggaatagcattgaatctataagttactttgggcagtatggcaattttcacgatactgattcttcctgtccacgagcatggactgtttttccatttgtttgtgttctctcttatttccttgagcagtggtttgtagttctccttgaagaagtccttcacatcccttgaaaattgtattcctaggtattattttattatctttgtagcgattgggtcacaatgtatttttatgagggatgcatatgtttgttttttgagatgcagtttcactctgttgcccagaccagagtggagtggagcgatctcggctcactgtaacctccacctcctcagttcaagcaattcttgtacctcagcctcctgagttatttttgtcaatttttaactgtcttatcaggaatattgtcactctgcttttggcttcctgaggtgattattaaagagttacaggatagatgccaattgtaatacaaattcaattaatggagttaagttactttcttcaaaaaataggcataggctctccttgcttttttttttttgttgttgttgttgttgttctttctagttctgctaatgatattgttaatgttaagtattcatgtacttacaaagtgtgcccagaagagccaaaaaaaaaaaaaaagttatattcattgagcatctagaaagtagtgctaaacaggcaatcgtaaaataaatcttgcaggatggatagtttacctctccatgatatgtttactgattccacttagcagcactggtctcttctttttctgtaatcctaaagtttttggggtcagcagcacacaatttaatgatggctgctaagcttcctcctttccctcaagataactggttttaaggtactaagtcagagaaagactggcctagtcttctcagcttttacttccccagatccattatgctctcagaagttaagaaggagagctttcctttctaacagattggtaggtatttagtacaattagatcaccaacgagctctaccacctatagtcatgacctattccactttcagaaatcccagatcaatctaaattgctcaaaatttaatacttaatgaaatgctttattgttttctaagcttccaggaaggcgattaaatcttgtggcttcagttaagttgtaaataattcaagagtggagaaggcagaggcggggcccagttgagcaagtatatcccataaacatttcctgcttggttgcatcaagcaagtttcaaaattctatcagatttaattgtattgttcaacatctttggggttgcaatgtattgatgatatattgtctgctttttcactcacattaatcttttcaagtgtctagtaattccagtccaccattcctttcctcctccatacttccccttatcaccctttatcatgagaaactgaccatgtaggagaaaatattagctttgaaaaaataggacatttactttaccacagtttctgatgttgtaacagatatctagttaaagaacaggttgttgaaatcaattatcagatactggcaggtgtggtggctcatgcctgtaatcctagcactttgggaggccgaggcaagtggatcacttgaggctaggagttcgagaccagcctggctagcatggtgaaaccccatctctactaaaaatacaaaaattagccaggcgtagtgttgggtgcctgtaaccccagctactggtgaggctgagacaggagaatcacttgaacctgggaggtggaggttacagtgagctgagatcttgctgctgcactccagcctgggcagcagaatgagactccatctcaaaaaaaaaaaaaaatcaattttgagatacctactgtgtatagttatcttggactgatgtttttgaggttgaggtgttagctggcatttcaagctatattatttttttcttttttggagatggagtctctctctgtcacccaggccacagtgcagtggtgtgatctcagctcactgcaaactgcgcttcccggtctcaagcgattctcctgcttcagcctcctgagtattttggattacaggtgtgtgccaccacaccctggctattttttgtatttttagtagaaatgaagttttgccacatttcccaggctggtcttcaactcctggcttattaggagcctcagcctcccaaattgctgggattataggcgtgagccactgcatctggcccaagctacattattgattggggactgcctcaagctatgaagctaaggatcatttgctgatgaaattctagaaatcaaaatatataaaaccaagttgatagtcaccactgggccattgggtccagtgagaagcagagaaagacaagccaaaagaaaaaagggaaggtagggatttggatagagcccatgaccaacttaaaatatgtaagcctgcctctgaagatactgaaatccttagcatcatattggaaatattttcagaatgtttccaaagaaaatacaaggtgaatgaaattctgggttttaagtggaattaaatagcaggagtacgttgcagagtataggctgccagactttaggatttatggatcagtacaattaaagagaataaataactggaggactatcaagaggtgccagctctttatttttgccaagcattgctagcttggtttccccctactaagattctgttgggtgaggagttaggcctaaggaataatagagtttaatttaaacaaaagatgagaaaacagttcaaaagatacacaaagaaaagtttattttcactatgtggaagttactagttagcgtttccttctgttagagtccagctcttctgagctctaagtcccacagggtcgacttctgccaggtgactcgcagtcagcataagtgggaagctctgcgatctggggagctatgctgtgactgacagagtccagttacagcactcttcatttgtgctcaggtaggtaccctctactgtctgcaagtctcaactccaaaccacactcaggtttccctagcttacactgtgctccctggagacacgcacagatgcaagaaagtgttttccagagctgttgatataatactttgtggctgctactttttttctaaatgttttttaatatggaaaatgctaagcatatcccaaagtaaagaatgtgtaatgaaccatcatacactgtcactcagcttcaacaattataaactaatggcgaatcttgttttttctacatttctacccatttccccaaccccagataattgtgaagcaaattccaaacatcagttcatcaataaacatcttgattatatagctctaaaagctatagattctttttaaaaaaaaagtaccattagcatgctttaaaataataataactcctcagtatcatcaaatgtctagttaatatttaaatttccttgatggtttcataaatgtagtcttatttacttatttatttacatatttatgtgtatatatatattatagtttgttttttctattcaggacacaaatgagatctatgtcttttttccagcagtttttaaccatcaggatttttatgattgcatgtatgtacttttattttacatgtttcttttcctcttgaattttctgtaaattgaaaattgatcctaaatggctgaccttttctttttttggcaagaatatttcatggacagtggtatgtcactcagtcaagaaacacatgatctctggttgtcactctttctttttttaatgttaaccactgatgacttggtctggatccattatttcattaagcgtgttggtattttcttatgctttttacagaaatgcaaataattacctgattcttggggcatttttaagttttcatattgttgtgctaaactctagcaattattcactgtttgcaaaagtgtgatctcaagtcttttgcacagcaagcagggatggtacggggcaaaaacagccatcatctaaaattatcactatttcatagaatgagaggttgttcaaaagcagatataggaaaaatttaattgaatattaaaaggtagaactttaaatacatatatctttctagaagattctccactatcctgattttttcccccccccacatgccactttggacaggggaagctgcattctggactcgtaccacagatcagaatgtaggaaccattggttaacaccataacattggttaacatctgctagaaggtgaacatttgtcttgccaaattaagggtgaagctcaactgtatttttgagggcaccatttatccattgtgtattccaaattactgtctacaataagttacactaagtttacaagctattgtttaatttattaaataaacatgtacaaaacaccaattctgtgtcatgcactgagtcaggcacttggattgtaaaatgaaccagaatatagaatacagatgtaacaaagatgaataaaaatgtggagagaagacattatgatataacaaagaaattgaagttaagagacctgcatcgttggttcctgccccacatctaagaaccttcctgcccatggcatgcagtatctgtgaatggtcctaatgaggcatatgtcttttcacacttattttgaaaactaagtaaaataatgaaaatcaaaggtaaactataaactataagaaattaaatggtaatgtttgaattcacttgtcataatttctcctagtacattttctcactgaaatagctataatgcatcctctttctcccttaaaaactccaaaaccctattctttacactaatggtttattgaagtaatctttaaaagtattctatcaccctcaacccatctcatgttgctgataaggaagcagcaatctaaaatgtgaagtgacttataaagatgcccagtggttgaacttcctgatctccaggcctgtactcttctcactatgtcatactgcctaaggtttctttcacattaggaactataagcatgggtggtacattctaaaatcctagggcattcaggaatgggaggagagcagcccagttttggagactaaacataagcaggataccaaaaaggcaggcggccacaagactccagggattctgtctgctaatcacttgttctgtttgctccatagctcctaccccttgctgtccttctcctcttctttgacttttcatatccccattcttgtgttgtcttgataccagcctgatgggactgattggtcttttgatggtggctttgtggctgttgaccttggctaatcaatctcaccttgaattaccaactctccttcaagagaaggaataacaacaagttgacccccttgacctgggaacttgaattcagtccagctgtttggggtagcatagtgttcctaaaaatcaaatttgaatgtcttgcttccccttccctccttggttcctggccccatccatcttcagagccaactgtttgaagacggaaggggccaggaaccaaggaagaggggaaaagaagacattcaaatttgggccaggaaccaaggagggggaaaaaaaaaactgttggctttgaaaatggaaggtgccagaaaacaaggaggccatcaaatttgaatgtctttatactagatctgcacattgtaatttactatatattccgccattgtgtattgaatgctacgagcctttttgttacattgctcataacagctggcctctaataatatttgagttggctattagtggactaaaattttcaggcagatcgggtattttgggggcagggcaccataattgtcagcttactatgagtctctcaagcccaaataattgcctgtagcattcttctcactcaactctacagggtcagaactgagtactgatatggccgagatcacagggttttgcattttgatgttgagtcttaggaggctccagagagtgtaggcggatcaaggcagttcataagaaaaaacagttcataaaaccctgttaaaacacaaccttgtatatgcttgagagtcgtgaaatgccttttctgacagaaatgcctaaattagcataagaagtagtactagttggttctacatgaaggccagggtacccttatcttatttctgaaagaattctcctggaagagacatctgccagagaaggtccaaggcggagcaacagtatactttccctttgccccaacctaatattcactaaaatcctcttcaatacaggttgccaatttggcctgttccatctccaacaatgaagaaggggtgaaattagttcggatggcagccacccagattgacagcctgtgtccccaggtaagcctcattcactttgtttcaaaagcctgtcagtgaccttctccactccagcccttgtgcccctccttttccttctctatttcctcttgctgaaaaaggctactcatcatttatgagctgtttcaagttctacctttctcagaaagaataaaccataccagtctcttcagaattaccatggcagcttggccaggcatggtggctcacacctataatcccagtgctctgggaggctgaagtgggaggattgattgaggccaggggttcaaggccagcctgggcaacatagtgagactccatctctacaaaaaaataaactagctgggtgtggtgggggcattcctgtagtcccagtttactggggagtctgaggtgagaggattgctggggctcaggagttcgaggctgcagggagctgggattgtgccactatactctccactcctgttgactttgttctatttgttttgggttgtgatttaaatgttccatatctatttaccttgtctcggcagctaaatcataaacttgcacatgtggaaagcaagagttgcatttctgctgtatctgtgctaagtcatgagacttgtccagtaaatactttttgaaacccgaggcaaactattatgtcttaaaaagaagcaaacaaaaattaatggtagttgaaaatctcctttatcttttatgtgtttgattgtccttctgaacaccaagaacccacttatctgtagaacgtacagggtgcatggttttaacatggtctttgaccggcttattcctcttttgaagtgtgtggtcatcatgtccctggattgtttccaacaaataggtcatcaatgccgctctgacactggctgcccggccacagagcaaagttgctcaggataacatggacgtcttcaaagaccagtgggagaagcaggtccgagtgttgacagaggccgtggatgacatcacctcagtggatgacttcctctctgtctcaggtaatcatcacaaacaggtcccttacaaggcagctggaggagggtaactgaacgagataaggaatgtctcgcaaatgtcatggatctgtgtttcaggcgcactccttagatctttgagcttttttgatcatctctgcaaatgtgattataacaccctcttagatgcttcggtgtttatgttatttcaagacacggagtcaaggcattaaaaaggaatacattatttaaggtggcttatattcctttttagtgtttggagtttataaagcaggatggcctttgatgtatctgaatcactcatgtaaaaaagggccagggaatatgggattcattaatctacacagtttatgtcttaaaaataggtgatcagttactccaatttggctatgttaagttttgttttgttttgttttttttccaacaagtgaaggtttgtgataacacaggtagagatatcagccacagaacttaccccttagcagggacttggtagctatcaaggctttgagcacttgtctatgaggttgtagaaggaagcgagtgaaagaaaatagaactgctcatcacttgaaattataactttcttctttgtaaatgaagccagactggaggatgctagtagacatgaataactgcagagacagtctgacctttaacaggactcgtggagtccatttcaagatttgtctaccagccagcaaatggacatttttccaaatgcttttgacctaacttatttggcccagttcacctggaagaatctctgtgaggaggaggtcactggaaacatcagccttctttgtgaggtgttaaaagagccagctgacccttggaaattcaaattggccaggtgttgattctacacaggtgtgtggaactcacacctactgactcaggcagtactagccctgatgacctgctggttcttggctgactgagggctgagggagacattgcatcactgttggtgggaaccaggcagacaggacctctgactgcaacagtgtggaagtgatttctgaggggggctgtcatgtttagaaaatgtttctagttgcagtcttttcttttccggaagaaacataataaattcccactggggcttgtctgagaactgtgtagtcaaatctgtagatttgatggataatcaaaaatccagcttttcaatgatggggcaagccaaggcagatgggaacattgatgtaacatgcggcctgtgactagaatttaccttactctctgctgcttgatttaattctcatcaaaattctataaaataggtactactaattctaggttttgttttaagaaaactaagtcattgagagggtaggtaacttggcagagatggtattaaaatccagatcatcctcttttcagaaactctataattctcaatatgtcaagatagaaaggaaatttcctttggtgcttgctgctttcatttcagcttccctttcccacctctggcattctcattccaatctctaatccctttcagaaacctgtcttgttttttattcccaaggtctttgtttttgatgacttgtgaaagcaactattcatttaaatatcaccatatctagagcttagctgataaaagaactcaatatattgtcacttctgcttttttttttttttttgagatggagtttcactcttgttgcccaggctggagtgcaatggcgcgatcttgactcatagcaacttccgcctcccggattcaagctgttttcccgcctcagcctccagagtagctgggattacaggcgtgagccactatgcccggctaattttgtatttgtggtagtagagacggggtttctccgtgttggtcaggctggtctcaaactccggacctcaggtgatccgcccgccttggtctcccaaagtgctggtattacaggcgtgagccatcgcgcccagcccatttctgcttttttatttttattttttgctttgctgatagctgagtcctaatcttgtaaaagatacctccacaaaatgaatctctcataaggtatttggaaattgcttagataggtatgttcgtaatttggttgatggggaatagaaaggtggccactgatactaatctttatagtatatggtcagtttttttccaggataactatggtgctccaaataggagccctttccaaccagcctcagatcacacagccatcctgacagcccctggaaatcttctgcatccccttctaccttcaaatcaataggaaatacctatacattgcctttttcagagaggaatcattttagaacttacaacttttccaacctattctttaaatgcatgcataaacatttctgagggtggggacaagcaaggtgaggaggtcttatctcagactttttcaataggacaaagcttttgctaattttcctcccccgagccctgcctctttgctcccttttctccttgtcattcctttgtgcatctcattattaccagcaacaagaaaaggcttttgcttctgctgataacactgtgcagtccaaccccagtggtacaagtgccacggcatgccatggcaggaaaatgaacaggcgctgtcagagagccagcttggcagggcctgctggagcatgcctttggagttgacaatcagaggcagcaggcacctttccgcagacggggtttgacaaataatgatacagcccactctgtcctgctggtaggctgtggacacagcccaatagctagggaaactacttctcatcttctctctgagctacagccaaacatttacataagtaaactgcaagtttggcccaagagatattttgaagtggcattaatgatattttatgtatcagtttcttcttaggggaatatctctttggtcaggaaactctatttaaaaaacaataaaaacagatctttgtttttaaaagattgtagtttttttaatgctaccctaacttctgtatctgatattaaatttgtccatatgaaatgcaacaagtttggggagcaatgatgctagctattaacattacaggagcaaaaccaattttaagatgtggcctatgcacataaaaaagtgaaatgactgtgtgataacagtcaaactttttcccactttggaaaacctacaatttttaatagtattttaaaataagcatcttggcattaatcatgtgacagtttaattcttggatttggctcacaaagtagtaggaagctaagatctgaaaaagctattaacttgatctcataatgcccaagagttttgctttttaacttttcctatttttttttaactctacagtcttaagtttattttcttttaaaaattcaccgtgaactttattgctttgaatctgtagccttatggtttacaacagtcaaatagtttggtcatcactgattttttttcataacaaaattatatcatttctaaaatagtaatgttgccaaatataaggaagtttacaataaaatatgttgcaatcaaatgtttcatgacatgtttaaataccacacttgatattagagtgtgccacccaaacattgcagtttttcacagcaatggaataatctctaggatacttttgccttttattactattttcatctcttttcctttctagttgcaacattcctctctctctttacttcatgaattctttctcttcaaaacacctcagaataaaagtgtgtaattgatcgccccttctcaatgggcatgttcattcagtgtctgtcttttgattgcctgctgcctataggccactgtcaggaatgcaaatgtgaatgaagtgtgtattctgcctttaaataattgactgccctccttgatatatactagattagcgtgcttactaactgttaagtcctagacctgaaggcacagggtatgggggtgaggaagttattacagggggttcaaaaatccatatatacaccaagtatggtcttctgaccaaaaagttcatgttcatgtctatgtaaacaggtatggcttttttccaaacacaggcaaacctcgaacgtattgctggttctgttccaactactgcagtaaaatgccaattgcaataaggtgaatcatacaaatcttttttgattcccagtgcatataagttatgtttacagtgcagtgtagtccattaactgtgcagtaggattatgtttaaaaactgtacatacctttatttagaaatacttcatttctaaaaaatgctaaagatcattctgagccttcagccagccataatctctttgatggtagggggggtttccttgatgttgatcagagtggtggttcctgtgtggttcctgaaggatggcgtggctgtggcaatttcttgaagtaagataacaatgaagtttgatgcgttgattgactattcctttacaaaagattctctgtagcatgtgagatgctgtttgacagcactttatccacagtagaacttctttcaaattggagtcagtcctctcaaactctgctgctgctttatgcactacatttatataatattttaaatcctttgttgtcatttcaacaatgttcacactatcatagctagggatagattacatctcaagaagccgctttgctcatacataagcaattcctcatccatgaagtttgatcatgacattgcagattcagtcacatctttaggctccacttctaattctagttctcttgctatttccactagataagcactttcttcctccactgaagtcttgaacccttcaaagtcgactatgagggttgggatcaactttttccaaactcctgttaatgttgatattttgactttctccggtgaatcaatcatggatgttcttagtggcaactaggatggcgaattctttccagaaggcctttaatttactttgcccagatccatcaggagaatcactatctattgcagctatagccttaaaaagtgaattttctaaataataagacttgaaagtcaaaatgactccttgatacatctgctgcagaatagatgtgttagcaagcaggaaagcactattaatctctgtgtatatctccatcagagctcttgggtgaccaggtgcattttcaatgagcaataacattttgaaaagaattatttttattctgaacagtaggtttcaagagtggacttgaaatattcagtaaaccatgctataaacagatgtgctgtcttcagtcttcgttgttccatttatagagcacaggcagagtagatttagcataactcttagggccctgggattttcaaagtggtaaatgagcatttggttcaacctaaaaatcaactgtattagccactaataagagactcagcctgtcctttgaagccagctatgaaagttgtaaatggcaccgtcttccagtagaaggctgtcttgtcaacattgaaaacttgtttgcccccttaatcaatgatcttagctagatctttaggataacttggcacaggttctatctacatcagcacttgctggtttaccttgcacttttatgttatggagatgacttctttcttaaacatcatgaaccaacctctgctagcttccagcttttcttctgcagcttccttacctctctcagccttcatagaattaaagagcattaggatcttggtcaagattgggctttggcttaaaggaatgctgtggccgatatgatcttctatttagaccactcaaactttctccatattagcaataaggctgcttcattttcttatctgggtgttcattggagtagcacttttaatttctttcaagaactttttcttgtacttacaagttggctgtttggcctctcttgacttgtgacatgtcttcctcactaagcttaatcatttctagcttttgatttcaagtgagaaatgtgtgacccttcctttcacttgaatacttaaaggtcattgtagggttgttaataggcctaattttaatattgttgcgtctcagggaataagaagcttgagaagagggagagagatggcaaacggccgtcttggtggagcaggcggaacacgcccgacatttattgtttgccttcttaagtgaacatggttcctgatgccccaaaacaattgcaatagtgacaaagatcactgatcacagatcatcaaaacgataatgaaaaaattttgaaatattgcaacaattgcaaaactgtcatacagagacaggaaatgagcacatgctgttggaacaatggcaccaacagacttgcttgacgcagagttgcaacaaaccttcaatttgtatttgggggggaagaaaaaaaaacccaccaatctgtgatacacaataaaacaagacatgcctgtagattgtttttaataaagtacaaatctatttgaaaacattctgaaccgtagtagcttttacatgtctgccatccatcaatataactactatcatgaagaaactgtgactcattttttcataaaaagggacctgaattggagaaggttgaaaaacactgagtaaactgtaattatatgttgcttgacgacaggcatatgttctgggaaatgcatcgttgggcaatttcatcactgtgtgaacatcacatactgtatttacacacctagatggtattgcttactgcatacctacactacatggtataacctattactcttaggctacaaacttgtacagcacgttactgtactgaatactgtaagcaattggaatacaatagtaagttttgtgtatctaaacatgtataaatattttaaaagtacggtaaaaatatgacataatcttatgggactacctttaagtatgtggtctgttattgactgaaatgatttatgttgcatgactatatcttaaaattttaaaaatttatttataaaaattagtcaattaggccgggcctagtgggtcatgcctgtaatcccagcactttgggaggccaaggcaggcagatcatttgaggtcaggagttcaagagcagcttgaccaacatggtgaaaccctgtctttactaaaaagacaaaaaaaaaaaaaaatccaggtgtgatggtgcatgcctgtaatcccatctacttgggaggctgaggcaggagaatctcctgaacttggcagactgaggttgtggtgagctgggattgcgtcactgcactccagcctgggcgacagagggagactccgtctcaaaaaaaaaaataaaataaaataaaataaaattagtcaattagtaaattataaaactaatactttgtacaacattattaacctgactatgtaacagatttgctgatgatttgagtaattaatagcaatgtttttgttatggatttctagcctgtgctggtttattttaaataggtataataatacctataaaaacatatttcttgcctcttaaattagttgcatatttctacttttggatagtcctattaaaaatacgttttcattttaacatattgggtcatgaatgggtttcttagaatttaaaaacaaacttattaactccagaaggattagtatctaatataattaacagacgtctcactatttttttctcaactccaaagtaccgtttctaaactctgcactgaaactttgtccattcttgtattactgttatacaaagaaaatagcagccggatgtgtgattttgacacaaatccttttctagttacttactctcaagggccaggacacattttaattgtcttaagaaattctacaggacagaaagagaagcttcttttaatcaaagttttacatttagaattctctgtcaatattcatttgagtaaacatttctctcagatgtccttttaggtatatactgtgttcacatgtttaatcatgttttcattaaaatgtcatgtctcaagaaaatgtcatgatttgggaagtactactttttgtgagttttagaaatcgaaatactaaaatttaaacgtttcattatttttctattctaatttatagttgaaattaaagaaatggagaatgtagaaatcagcaatttataatggtttgagtgaagaaatcacactgtatgaggtcaaaatggatgttctttatgaaaagtcagttataacttgcaattttctatcctgtgtcctaaaaatataaattttctttctaagtgcttaatttagtaaaagtaggggagatcggtagtggagactaggatttgctggatactctctttctttctttaggaaatttaaaatcagaactagccctaaaagcttcttaaagaggtaatattttattttaactatttatgaactattggttggatttggcagttataattttaaaatattaacaggttacttaagactttaaaaatatatttatcaaaagcacatatttttatgtgttcatgtcttggtgtgttttggagaatactgtaaactgtgttgcttataatcaatagaaatttatgtctcatggttctggaggctgggaagtccaagacaaaggactctgctttctcatagtcttctcactggaaccttgataggaagaggatagaaagagggtagaaagagggagggatctctgaggtctcttttataaggacactaattccattccttaagattctgccctcataacacaatcacctcctaaagtctgcacctcttaatactacccctttgggagttagaattttaacatatgaattttaagggaataaaaacatgcagtttattagttggtgtgtgtgcatgtatgtgtgtgttcagcttatttacaaagagcactaaactttttgaacatttccttagaattctgcttctaaagaatgcacaaggaatagaattacagatctcacactggacatgaaaaatacaaaattacacacttgttaaaactgcaagggaataaataatgtgttttctctatgccattagagagtgaagcctcccctctatgcctgcttgatttctactttgggcaatcatatgaaagttatgcagatcttgactataatctgagggaaccagccacaagactggattgtattttaattgtgggaaactgatcgtcttcacctaatcagttttcccattgcatataccgtgtgcatgacataattttaaaagaccaactgcgtgatatttatttttcctcaaatgttttcgtaatgaaaacatgattaaagaaacatgtgtccaaagctttgactctggttttatttatggacatttatacttggtcagattgacttcatgttggctgctacaacttctaaaaggccctgtcgtgtgtaagtatcaaacttcaaaacaaaggaagggatattctttaagtcagtggtcctcagaatgttgtcttcaaaccagtggcattagcatcacctgggaacttgacagaaactcaatttcttgggctctaccccagacttactgaattggaaactctaggagtggcacctagcgatctatgtgatgctaccagccctctggctgatgctcaggtttgagaaccactgttgtaattataaactatgtcctttacatacaattttagtattattaggcatgcattgagatgtgtccaaggcaagggctcatgagagttgaatcaattttaattggttaagttctgagttatgtaaagtcatctaaatgtgtatgtgtcctctccatagaaaatcacatcttggaggatgtgaacaagtgtgtgatagccctccaagagggcgatgtggacactctggaccggactgcaggggccatcaggggccgggcagctcgagtcatacacatcatcaatgctgagatggagaactatgaagctggggtttatactgagaaggtgttggaagctacaaaattgctttctgaaacaggtaagcatgggtattgggtctggccaaaatgttaatgccttgattagtttctataactgaataaatctgtttcattgatttctgtaggcctttatgcttctaaattgcacataattgtggaatgggtggaatacttgagtgttctctttgttttttgagtttgaatttgaataatattaggagaatgacagttgtactgctttgcatgcatatatttctttatacttttcatatagatcatttgattctcacaaacaataaaatttttctgcttacttaattatctccaattatggatgagataattttatgacttgagaaaattatggtttgaattggctaagagactggaatgaggtcacaaggttagaaaatagtgcagatgtgataagaacttggaatctgtaatttaaccttttcttcatttattgcttgagaggataggaccttaaggaagaactctgaaccagccagtggaaagcataaaggttttagatagtgagtggatatgacgtgctcaaagaaaggtggtggctgctgacaaagagttaggctttcagcatattccctttctttctaggaaagctttacatgcccttcttcaggggcatgtggctgctcacaggactcactgctatggtcaggtatggttacttatgggagcttgtcagagcttgcagatgcattggggtaaaaaaaaatgcttccactgaattagaacaatctacaactctggagaatatataagactggcctgtttttagtagttctcccctcttgaccaatgtcttttggcttcctcaggccttgatttatatatatgagataagatatatagtccaaggaatgagaggaaactagggaatagaaaaagagaatgtaagtccacattggataaggttgttaatgaataatgaattggtgcatatatatgcacagaagggcctctcccctcaaaccctaagggggaccttcataggtttgcctatgagctttggatgccaccaggcatttttaaaatagccatctctgaaaggtcagatatagccatgttccaagttctgcatgatgagatgtgttggtagaaatatgttgctttttatggggaaaagattatttacaaagagttctgtaggtatttgttagcctggaatagcaagtaaaacacaatacataaacacaggtattggtcattctctttaaaatataagcagaaacagaatagtgtggtatcatgttataaagagcacatctagagactgttgcccttggaacatccttacagacttagacttagacataataacaaaaataatgacaagatatgactgcatttgaattagctgagagtcagcactgctttctttcacataagcttgccctttgcattcaattgagcaacacaaagcaagccatacagtatttctttcctcacttggaagagttataaaaaggtatttttttccctaattctccaaattaaggactttttcattagtaacctttagggagaccatctcacatttctgtggcttacagttcccagcccatcagctctattcttgtacaaagtctcagcttcatgtgagatatctgacagagtaacactcacctgggtctgtcactagataaataataccagagaagtgttgaagacctagagacaggactcagttcctgcccactcatgactggtgggaaggacacttgtggcagatgaaagatacagagcatattgccaattttcatgtgactttctacccacagataactcaggcactgttcaaatgacattttagaactttttcttattgtatcttggactgctttgacaacaggagtgccacttactaggtcaaaatctaaaggcaaggacaattgcttagttgattgtaatattttaacataattttcacccaaagtcttgatatgtaaataatgttctggttgatttttctacttttaaaaaaacaaatagtcgttcatcctggattgttgttgctaatcaagatttttgctcttacttgttctgagtttttacaatttttatcctggcttgcaatgattgagcactctgggggcttaactaaaggcacctttcttattttgatgcccatatccaattcctaattgaatacggtagatgagcaggacatttaaattctacttttcaggatttattgaagttaactaggaaagtaaccaggcagagactgaaatagacagcttatatataactttaattgaaaatataggaataagtgtcaaggaaaagtgggtgtcagtggactaagagctagaatacaaaggtatacaatttctttggtatttgtccccaattgttcttctctttctgaaacaggaataatgttactattttgtgaataactagagaggttgccaaagaaatgaaagaaaaaaacttcagctattaactcactgactgctaatgagaattgctggggaatgtgcttgcataaagtagacacgtggagtttgaggatgaccacaggatcagttctgtaattatggttgtacaaagttttgttggtgtgtgtgtgtgtgtatatatgtgtgtgtgtgtgtgtgtgtgtatatatatatgttgtctaaagtgatttacttctaatgtcattgtatgtctgtgctaaggagacataagatatatgtcctcaaaatagaaaccctgtgcatgtccctgatgccaaattatctaccttttgcttagttttgtttctgacttaaacaattttagagccatgttgaattggccacttttctatgtgaatctatcaaattttgtcatgagagtacattgtagggtgagagagggtggtagtgggaaaaaagggaaaaatgccaagaggaaagatgaggagaaagaagacaaaatgtcatggtttttgttgttgttgttgttgccacacctactaggttctgcccattgatttttttgtttgatattttatttttaaaaaattctgtgccattagattcaagaccttgagtcagacatgctcaacctctgtactgttgacactttggtctgaacagttgtttcttggggagagttctggggactgttttgtccattatgggatgcttagaagcatccctggactccacctgctaaatgtttgtagcatctctttcttctacatgccaagttgtaaccaccaagatgtctctagacattgccagatatccttgaaggaagtgggtcctggtgggcaaaataatgtgcactgagcattactgccctaaagtaaagaaataacccaaaatagggacaagttcaaacaggacagattggagcccatgtactgtggacatagtgaaaagggagtggggttgggagtatattacaaagaagaatctgtaaaagggcagaataatcaaacagccttgactgaactggatgttgctgctgaaggtgtttacacacaggcaaacccctgtgtagacagatgaatggctgcatgggtaggtcactgtagggagactcccactttaccacttggctgccctcgctgagtggctggaaaattgagaggtgcccaaagagtgataacacatctgtggtttattttccatgaattattttctttccttagtaaagacagtgctttgcttaagagtgcttcttgtcttgatatgaatgctgaattaaatttaagaaaattttgtagattattagtatgctaagaattatagggtagcattatgtacaaatttacctgttcattttctataaaacaatctaggctgatgaaaacacaataaattggatctacagcagacccattaaatacttacatggcatatttgatgggctcttcaataaaacctgaattataacaaattgccaaacagcttagtagtaagtacacgcttgaccagacccatcttcatagatctcgtttacaaagttgggttgctgcaggaggctgaggaggggtgaaagcacattcagcgatatcatatttatatatatatatacacacacatacagtagctcattcttcactgaatggattatattgaaatgtcatttttgtaaatttgatagctgactcaagtttgtggccatgtgagcgtgactaggttaaaagatctgtgagattctgccagatattttttcttcagaggaaacaatagaccaaaaaaaaaaaaaaaaaagaaaaaagcatattttaaaaagggttctatgttatggagcactctgtatgcagagattaaaattccattattttggaaaatacgtgggccaagcagatggtataatttttacttccatgctctataacctaaagttttatacgaatgggaaggtttttcgttttacaacatttctatatatttttgcttagaaagtataaaaggaccaacaaatacaaagcatccaaactggaaatcttattgagagggtacatttgggccaggacaatgcagtagaatgaatccaaggttaggattcagaagaactgttatttgactgctaccaactaactgtgaccttaaacaaatcagttagtgcctctgggacttgggttttttcctgtattgcccaatgttttgtcattcaagaatgggtcggtattaattgcgtaatatatgcatcactgtttctggcttcctggtgactgcacttggcataagcaattattgcccatgagtcccctgtataaaccctctgcaccatctggacgagggccttcattattctccaggcaaaacatatccatgctgctccctctgtcctccctgcaacgttcttcatctcctcctcctcctgctttacatctgtttattgagattcacctttaaaatatagctctagtctcagttggagaccacagaaaactattagtcttttgacatttagtatggtatgtcctcttcagtgtaaatgactgcttacaacaggattgtctgtttttagaggcaagtgtttctataggtacccacagcctagaatggtgttttcagtaacacatttaatacgtaagtattgattaaatgaataccaaaaatgagaactttacactttgtcttttttttctgtagaaaatatgtctaccagcagcctcaggtttgcagctcaagaccaatttctgtgtatcaatgggaaatcatctgattggctttctggcctatgcttccttcagttggactgatttctgttgctagtggaatagagttttatgattggacaggtctgagtgacctgcctatctctctggctggaatatgggggactggagtatgagattgatgtcagaaggaggtggtaggggcagcttattgggaagacaaactattaagtattagagataggaaggactatccacagtctaagttacttcggcatgactaattttaagtcggaagtgtaggaagaatgagaaagaagcctcatccagtaaagagcccttaaatagataacgtataatttgtctcaatgtcttttttatatgactaaaacctatatactctaagtattgtagaaatctgataagtttttgaagatctgtataatttttcctaaaagcaaatgcaaggttttggggctcagaaaacaaacgttactttgcacagtaagcatgtcagtttcccatgttccattcccgctcttggagcaatgtgatgagggcagatggattctgcacatacagtggaggtctgtgctacaggtggggaaccacaccattatgaatctaggagcttatttagaaattggtgctcctcctgagggcaggaaagaaacacttcctctctctttttttgagatgaagttttgttcttgttgcccaggctggagtgcaatggcagtctctgctcactgcaacctctgcctcctgggttcaagtgattctattgcctcagcttcccaagtagctgtgattacaggcggtcgccaccacgcctggctaattttttttttttttttttttgtattttcagtagagatggggtttcaccatgttggccaggctgatctcaaacccctgacctcaggtaatctgcctacctcggcctctcaaagtgctgggattacaggcatgagccaccgcgcctggccacgttttttatgtaaacaaattctgtccaggaggtagccaagtggttaaaaacttttggaatataaatgcatggttcctagttttatccctcttttgaaatgtaaacatatctggagaagctgtctataaatctctctccaggttatttcactatcttaggactgttaacctttgaaccaggttaccagtattttcattcagacagggttgaccatgcagaaacatgaaaatatttcctatacactggtgtgtttgtgaatgatgtgttctcccacaattcagacatggtcagctctctcagcataagaggctgaagaaccacctcagaaaatacgaccataaccagatagcttacaatatagaaatgtaaatgattcctcctcaaaagaaaagttgcttgaactctctcataagataaatgcaaattaaaaactacgctgagaaaccattacccatcagaatggcaaaaatccaaaagttctataatatatatactctgttaaggattaggaaaagtcatcttatattttgcttgtagatgtgcaaaatggaggaaatttgacatcttctgtcaacagaacatatttaacatttggaaagcaatctcacttttaaaaatctgttcttcagatgtactggcaaaaaatataaaaacgtatgcacaagattatttattacaagactgtaggctagaaacaacacaaatatctagctttagggcactggttgaataaattatggtctaatcacacagtggagtagtatgcagctataaaacagaatggggaataactatacaatctctgactatatttttaggttaaaaaatgaggtggaaaaagtatgtataacatgttccatttattttcaaaaaaggtaaattatataacacaggaagagaaagtaagatacaaaattttattctaacaataaaacccttaacgtgaaggtggagatagggtacggtaaacataggaagattcacaactgcatgtgtgtataggccataaatttggggtgacacagcagaacaaacagcacttctctagtgcctgtttgtcaaagtacaaccaaaaaaaaaaaaaagaaagacatgaatctccagttcttcatggattcagaatcctgggaactggagagtacatgtgcttctttgtcacttcaaggacatcagagaccagcatctgtggtaatggcagtgtagtaaattaggggcctacatattgtgtctagcagagtcagtgctggtgtccactggaattggtggtctggatgctttaattgtgcacaactgaggctgtagtaatgtcctgtcacccagattctctgacggaggggaaactgccacatcagtgataggtgtttgaatcagaggaagaatatgctaacagccactcatttggaagcacatgtggtacatccttggagtattccagaaatagttttggtaatgaaaaaatgggaacctttgcatgtagccggagggcctgaaataacaggtgaacaaaagaacaacagaagtactgtatatggccagagtagtctccagatgacctccttgccaaattttaaatttgttttgtagagacaggtcttgctatactggctagagtggtctccaactcctagcctcatgtgattctccccacctcagtctcccaaaatgctgggattacaggcatgagcccatcccacttggctcctggtttgcctttctgtattttacctttcctctaattctacctgatttcttccttgtcagtgaagtcccctttctaaccagaccagagaagcccactcttcggtgtacctgttactcttattatctgtgttactcatttggaacctaccatatactgccaagtatttcatactccttgttacccacttttctacttacgtttatatctgtcctagtgtttatatctgtcttctgtccatcttagtacctgaggcatgtgtgtatgtattgactttttgcatgtttttgttaaattttaacctcttaagatctgagtctacctctccattacctgcagctttaactaagagttgaaactcaaagatgtcattaatataaatgagtaacataatgacacagttaccttattctgggggattaaaccctccttaaatcgcatacttaatgatcaagataagaatcttttaagttatgtgcaataaatttttagcaagcactttattacatcttaatgcaatctaagtatttaaacatcacagatgccaaattagactgtatttattaagctaggttttgacaaacactaagctaaataaggcatcatgctcatgctcaatactttattcgttccttaagtttcagaattaaatgtgccatccttttaagttataaaccatttgtgattatttttgaaatgcttattttaaaatagaagaaaactttccaagcaagcattttctttcctcaggaaaaggaatttgtgtctagacaagagcagatggatgctccctgattcttttagggtagttgtcgtgaatggaatttagagagtttttttttttttttttaccccctccttctaggcagtccttcttcatcttttatcaaacaattcatctcatgggttatgtattgccttctggaacttaaatttgatttatgtttgaaatatacatttataattttcccaacatgaatttatggaaatggcagcctttagaaactcccacagaggtaacagatgattgactcggatgaaagaaagtccaagaatgtatgcaggaagaattgggactggccaagatgatgatagttgtctggagaggtagaaacagctgacaaatagcagcaaatagggagcagattaagccagggtactgttgttcttgctcctggattccaattttcaacttcgaacctgatgtctcaagacagaagagaagctagtatatcattggtctaggcagaggaagattgaaatttagagaaagtatgtaaggtttatttctacattgcctctgctacattttaaaaaagcatttgaagacacttaagatttaaattcaatcaagtgatgtaaattaaataattaaagtggtgtaaatatgagatagaaaggaaatagtttcaagagaatattggatgaaactgggtggctgagtagaaactgtgtttctactgggctaggcaagctgagtttgaattgttttgtttttattttctggaagttactactttgttggtaaaggctttcaaagactttctttcctcatggatctggggaggtcataatggaacaccatgtttaacattggccttcttggcaagcaagataaaaagcaaagttctaggagcaagtttatcaaatcttgtcctgagggcagattatttcacaggaaattccttattaaaaatgcaacactgtcaccaggatgatacggggctgctgaggggagagaagggcatagaactggggaagctcagtttgcaaaacaaattgtaccaacttcccggttttcagattcagcactaattggtgtgctgtgtcccattatgctcaccttttttttttttccatggtgaatcgtgtggttgtacctccaagttctttccaaaagagactaggtgattttgcctggtagaaacagtgtgtgcatgggtaaatgcagaaagtcatggtgtgaagacagccccaagaagcatttactatggctctttcatgtgctaggcagtgtggtaatcatctgacatgcatcctacttgtttgtaagtgcctccaaagcataatgtatttgtgttatttaccactcgattcccgattcccggtgcctagagtactgcttagatttgcatataaaatttagtaataaacttgttgaatgtatttctgatctttatgtaaaccctgaagggcaatgatcattatttctgttttatactgagtaaactgaggcttaaattggtttaataacgtgtaaaattaaatatcaagattcatttacacattttcctggaaccaataaatatgcttgaaacgtagatcaagcatcgttgctacaattaaacagaaattttcatgtgtcctgctagctagttttttaccaatatttttacttagggcatagctatttttactgatagttttacttatggcatagcatactacattagttatatatttctgtgtaacaaattacccgcaaatttaacttgccacgtgggcttttctttagagcagcttacaacatggcaactgtcttccatcagagttaagtaaccaagatagtaagaaaacagaagccagcatcatttttcatttcagaagtggcatcccatctttttttgccatattctgttggttagaagtgaattactagttccagctcacattcaaggttgaggggattacacaaaggcatgaataccaggagaagaggaatcactgggggccctctcagaggcatctgtcacacatacatatttgcaaatacatgaggataggagagaccataagggtaatgaatggcataactggataaaacagtcctagggtgtgtggacaaatcccacaacatggacttaataaggacatattcaaatgctggtataatagccctattaccttgtgcagtggcatttagagcacaaaagatccactgaggcaatatgaagccatacagtatgtggacaggaggggacagaggaataacagagctagatcgtggagaaggaagggcctagattcattcaaggtgattggagaagtgggttggagtcaaagagaacagataagagtcagggaatggtacatagacaaagctggtacataattcaaagatcagtgtgcatgccaaagggaataaaaaactaatggcatcatcaggaaaaattctatttgacttaggtttagagattcgaacattaattgaagaagctctttagcctgtggtgtcagaagtcataaccaagattcgagtgcatgtgtgtaaaattaggggtggaagtgaaagctctgaacagtgtacgaacccttagccaagggctttaatgagattccagccatcctcgtacctcctagggaaggcacacacctataaatacatatggaaatgaaatagtcactatttgcgaagtagacgtatagatccatttgcctagtaggtaatgctcccacccaaacatctctaaaaagattctgagctgaggatttttaaagtcccccgtgtaggggtgaattgggggaatacttaaagaccttctattaatttatgatcatgacattcgttactaaaatcactaatataaaatggtggccagcttctatgatttgtcatctgttcttaagtggaactaaagggagagatgtgttatggcttcagtttggggtagtttctacttctacattgactgtgaattggaacttcagactcggtcttcttacaactgattatgcttcatggatgtgtggaattgtcaaggcacaccccgtgccttatagatgccagtcagagtcccctttgggcaactttagggccccagtagttgatatcacactctcttttacccttttttcctctcttctgtcatctaattagggggcctcctgaataatcccttagcagtgtctgacaggaaccatttttgggaaagaatactttacctgtagaaataacatcaaacatcacttacctggtataggggacactggaatggccccacagtgatcctccaaattaatattttctggctccaattactctgatttttccctaatctttaccgaattccaactgttacagtagaggctcagtgactgtctgtgatggggggaggatattgtactaattcctgcacaggaattagctgcaattccatccctgtcgtgatattttatgttatttttagattcctttcaatgctcttttttttattttatgttaacagttactaaactgtttatctctctcgaacaggggctttgtctattttcttttctctatgctccataataaaatttgtgcaagaaacacactcagagtgtgttggatgactgcatcaccacagttgggtgacccctgtgcatgcagatgtgcttgactggccttggcgaactagttgagaatagaattatgaatctttcttgctcaatggtgatgctccttctgaagaagcagagtcctgaaagaatcctgagctcaggtttctgaaaggtccctacagaccaaacccagaatgcccactaatcacttgttaaatgactcgtgatactttttaataaaattactgaaccaatgctaaatgatgggcagaaaaagagagacttgttatgtgaaatgtgatgctactcactttgtccgtgaaatactggatgacaaaggagttcttcatcttaattttccccatttattcctgtcctattcttttacttcttatccttctctacccaactggatagattgtctgtgctagaagcaggacaagggtttaaatgcaaagaatgaagcagagatggtctctgcctgaaggcgattcatatgtgaaacagttgacatacagaaataccgatgaactagcctaatacagtatactgagtgctataatggtgtgcgtgtgtgtgtgtgtgtgtgtgtgtgtgtgtgagattaggatgctataaaattacagagaattgtagagaactgtctactttgggttctgaggattaaagaaggcttcacaatggcaattagttctacactggagattgaagattgagtaggagttcacctgggccaaagacgagtatgtacatttcagtatgagaaaataaatcattcatggatatgttgctgtgggtccatttcatatttggagatattgaagttaaagtctgtctaactggaacatttgagaatatgtggtaataaggggtgagacagaaagacacaagaaccatataggcagataatagatgctttttgtgtttgtttcttgataaagaggttttatagttctctgtagtatagggaatcattggaatacttaaagcaggggtaaggaccttttatatacctgagggtagcgaggttacctgactcttcatctctgctacctttggttgaccttgcattttgccctttgggttgtcagcagtcctatttgaatatttaacacaacttctcattcatttaactgactcaccctgtgttctgaaacttcatccctgacgtctctcaggagaatttattccagaactttctcacctctggtttaggatctcgatcaacactagaatgatgcgaccttgatttttatatgcatacttaactctgatttcattactcctagggatatcatcgttttgtggcctagtgtgtgcgctgcatacagaaatatagctagaattcaaaagtttatctctgaatttgatcaccctttcagacataagctattaagaacaaatcagcatttctgataaataactgtaaagtggtgcctacagtttttggatgtaattcagaaagcagaaagaagcttctatttatattcctatatcaaaaactctgttaatacacaatgtgtgcatcacaaaggcaatgctgcgttttgtcctaattagtgagaggcagaagcagcatcatatttgaggaagtttgaaactttttctgtctcagtattacttttggggtatttaggtttttttttttttttttttttttttttgagatggagtcttgctctgttgcccaggctggagtgcagtggcaccacctcggctcactgcaagctctgcctcccagattcatgccattctcctgcctcagcctcccaagtagctgggactacaggcacccgccaccacacccagctaattttttgtatttttagtagagacggggtttcactgtgttacccaggatggtctcgatctcctgacctcgtgatccaccctcctcggcctcccaaagtgctgggattacaggcatgagccaaggcgcctggcctagattttttagacattaccaaagtattagaaaaattaatagtcaacctaacatcttaggttctgtcaagatgggtcattgttctataaacttttgtttttatgtctcatcactctttctgttttgagacggagtctcgctctgttgcccaggctgaagttcagtggtgcgatcttggttcactgcaacctctgcctcctgggttcaagcgattctcatgcctcagcctctcgagtagctgggattacaggcacctgccaccatgcctggctatgttttgtatttttagtagaggtggggtttcaccatgttgcccaggctattcttgaactccagacctcaggtgatccacccaccttggcttcccaaagtgctggaattacacgtgtgagccaccgtgcccagcctcatcactcttaaaggcagaataggataagaccgaatgagcgaagagcagcaatgtggagagcagaggtattggtgattaaagaacagtagcagttgaccaatccctaaataaatattgaactgtgcttaggattggtctcagagaaagagtttcttaggggtcagacccagaaaaacactgacttatggtaaggaaaaaaatagatgtcttgtcagttacagtaaatataatgaattgaatgagttcgagttttatgttttactggccaaagaatataataagatggtttaaatattaaggctcaattgcactctgagcctctattttaaaaataaagaacttgtaccctctcccctatcgtttttttcttccttgaaaggtcgatggtagttctgttccaatctcttcataaaaattcattgtttctgccacttctgacaaccccaggtcaataacactgttgtttataccaaaatcctaccatccaaatctcactagagagataatgtatgccatgctggtgcaaatagaatcctcttctccaaactgtatgtcacagcattactagatgtattctgagttgcagagcatcccctatgaagtccatttaggttttagctttctcctctcacccttgcgggaagtatcaggccaggaggtggttttagcgagatggcaaaaaccgcatttatttttgcaccaacctaatagcatgtcaccttctacgttgtcctcctccccatctcttcctcagggtgaccttgccacaaacaaagcaacaccataacctttttcacccctttatattcgagaaaggtcttcatgcaaatagaggtgtgttcatgcaggttggggtctgagcggtgggcattttcccactcaacttcttagttggcagttactaaggcagaatattaagtgtttgatcacagtcataatgtctgagggacttcctcacttaatgatattgttcagatcggtttctatcatgttgtgggccatgtgatagaactttattttttcagagcccagttctataagaagtacaaccttgagaataatttgatttctttttaaacatgtgaattatgaaaagattcaaagatacaaaaagaacaaagactaataaaacaaatgtctctccttccatctcaaaggtaactactatatttaaagtggtatatatccttttagaacatgtaagaacatgtacaaatgtatatgtttaaataatgcacagttttcatttgtgtatttaaaaatttttcacaaacgatgtttcttttcctactcacacgatattgtttttcccactcgaactttgacctcagggcttattcactttaatatattgactgtcccctgactcacatccctaagtctgttttatcccacccagatgtactgtctgtggatctgcagttagcatatcaaagtggttcctgagttggaggattcagaatagggctggggtagagcctgtagacagagctcccttaaagcaattattttcattctcaggttttgtataattttcttcttaactctttgaatatataacctagcaggaaacaactgtctctatggttatagagacacaaaaacatttttgtgactccaatgtacaattacttacccctcctaatcagcatttctttagaagttaatatttggccaagcccctagagaatgccccaaatcacagggagtggattttactagattttgtcaaagcacttgccgaaatgatgtgtaaccattgttctcccatctgtagtagaagggtaccattgtgtctgcatgctcaatatgattaatattattatgctttaatttgtttacctatgcctataagtatgaaattacatctcattgtttgcattatttctctgattatgggtgaagtcttactgtgtatttatcagcaatatggattgcttttctgtgaactgagtgtactaattctttgtcaatttttaatatttttccgtattgatttgtgggattagtctatttattttatatacatgtaggagtactaattctttatcagttatatccatagggataaacagttttatgcctctgaaagctcccttgtagtattacatagaactataacatcactgatggtcatacttatggcaacgtagacaccgtggagtggcattaatataactcagtttaagaaagagggaacttgtaattatatttaagaagatacttattctcaaattctaatatgtacaaaaataatttcatgctcactattgagtcatttaaaaaagtttattcccaacacgaataactcaaatagtctgagtttaatgcagtggtttttagaaatatagttttatttgattcatatttgtggcagtacagcttaatatttcccaaattcttttatctaaatatagcttaaaagcccaaatgaaaaattcaagtaatatagagaaccaattatagtaattcatccatagaaggagatttccccatgcatgctgtggtttcggtaatttctactaaagtgtgggcacacagttttcctctaaccctgctgtctccccctccttttttaagtctgtcttttcctggtagaaatacatttttccaggaatgttttatcttgaatactctgaccctacagagtaaagtaatttagcagaatttctcacagagggattaaaatggatattaaagtatccacagaggatgaaagtgagtataaagaggaatcaggcatgaaagttcaggaatggaaatagatgaatgatgtttctattttatcatccttgtaaataaaacgaatatgcttttggctttcatttactatacaaattgattgttacaggataaaagctgagaaaattgaattataatttttgagaatcagtgaatcagcagcatcttttaagaagttagtggaggtgttccagacgctccgctgagtttactttccactaatctctagggtgtgtgcaggatccctgtgaaaataacgaagtgtcagcattttagaaatttatatacgtatgctctttcacatccgggtggtcctggtaagatggaacactttatctttgagcccattggtcttctctttccataggacattctgctgaaatgtcccgtgtctgtctccctcttttctattacacactccttccccatcttcccttgctccaccctcccctcccccatgtctcaagtccagcatttctgacaaaagtgggaagggttgtatcatttcatccacatttgattgtgaagccatttgggttaaggtctgctactcaccagctatgactgtaacatccgatattagttaaatatttattgatacttccaaagggccagattccacccaaaacttttttgcattttcccactgaatcacgaagtagaattttattacattttatagacaaagaaacaggttaaaacgtggccaaggatttacagtaaccagtaaccagcagcaaccagcagaaatgcaactcagtttggggttagggtaacatgaaaactatattcacacactacaccacactactgtgggcaggttttaaaaactttgtcttttgcaaaccatcaccatgcatagaataacaattgggaaagtttcctttccctgctcctgaggtaactgtcataaagactactaaattgggctcacttcaaactggacagatgagtgtcttgctccacttaacttttagaatgcccgaggacctgccacttcgcccaagagctggaataagaggtagtgagagagaaattgcctaatcctctgctttttatttttaacccagtgatgccacgcttcgctgaacaagtagaggttgccattgaagccctgagtgccaacgttcctcaaccgtttgaggagaatgagttcatcgatgcctctcgcctggtgtatgatggcgttcgggacatcagaaaggctgtgctgatgatcagggtatgtgaggcctctgtagctcagagctggtcagatctcctagtaggaaactaaagagctaactgtcttatttattatttattttgtaattactgagtttaacttggtaagctgtttggctccttattagtcagacaaggtgagctttatacttatgaagggatgagtaatatcaacaagctcaagtgagcactgaatattctgaagggcaacaccctgcctacttgttgcatgcattacttcctcagtttcatacaacctttaggcatacccctgctattttccatttgtatctcttgctaacactcttcccatcaggatctgaagaccatgggctggaaagaaatgaagattacacagcatagtagtgtttataataacacataatagtaacagttattatcatgcaactatgaagtgatacataattacattctctttgtataaaaataattcagacattataaataaggctggatagcctaacatcaaacctcttattacccactccactatcttcccatcttcagacttctgttgttaggtaggtgtgtcttccaaaatgttgtctaaataattaatatatatattcacaggcctagaaaatatatattgtagttgatttaaaaactcatacagcatcatttgcaactttttgttcacccacaaggcacattcacatatgtctgttaagacatctagctaacctcattttatttaactgctgtataatccattataagatgacttttttctccttatcttaccaacagtttagcatagtaatgtccaaacatatttattagccacataataatctttatttcttcaaatatactgcatatgcaaaagcacatttattgctattatatttgaagcagaggtggggcttctgcagttctaatcccaaaagcatgctgtccagtagaatggtatccacacttgtaacttaaaatattctagtaaacacactacaaaagcaaaaagatgaaattaattataattttaaaaatttatttaaccaaatgtatccaaaatatcattttgtggcacactatggtgttttgtttggcacggagcctaaatctttctctctctttctttctgggtgtgtgtgcgtgtatgtgtgtgtaagagagggagagagatgcctagaaatatgggagggggacagagaaaagagatataagaattggaagagagggcaaggaaagatagtcagccttttaggcccataagaaattagatcatttttgtactaacttgtgaaataaagtaatagaccatgagaattgtattttcaaagcatttggtactaaatcccactgtaatcctcaagatatattccctcttttgccatttttctgctttgctggccttcacatgtttgtcacaaccattcacctaggaggatgagaaagtttatagccatcattcacttactaattcatgagctgtaacacacacacacacatacacacacacaattttagataaaatgtcgtatctttgtcacataaagtgtcatttctctatctcgacatttcaagtagtttgattagacggatttcacaccacttaaaatttaggaggagagaaatgtacagtatgtacaaattgttatttttaaaatccttctccattcagcacccaaatggcttcattttgcacttaaataatttcttggttttctttctgaatgtaatgattgagtctactttaaaaaatcccttgtgctaaggaagataaacaataagacaagtagaattgtttctttcccaaaacatttgaccatacctccttccctcccaaaggctgcaaagaaagatttttcttttcccaaaaacaatacagaaaggatcctgaagggtcaaattctttatcatcttgtctcttggcagtcaatacatatttaatggtgatgttggtatccaagtgcttgaggccagctccaggcaaccctctgaagtagacaaagcttgttcttactgtattccagcctcagctgtcaggacctcccttttctgttggagcaatctacccctcttccatgaaaccattttttttttttttgcttcttcctgaggcttgtccattgggatctgttaggcacataggaattttctgattatccccacaaagtggcttaaaaatatatatgcaaatctggcagaccaacatatagtcatttttcatttcttacagtagttagtgttctacaaattcactgtgaacacgaaatttgtgaatcttgaatcattgcttctaggagaaatacagggttaggttactgtgagcttctggccacacttttatcaactgatcaatacttaaccttgttttatgtgagtttgtgttcaaagacaccttctttaatatgtattgttttttgggggagccgaggcaggtggatcacctgaggtcgggagtttaagaccagcctggccaacatggtgaaaccctgtctctactgaaaaaaaaaaaaaaaaaaaaatacaaaaatcagccaggcatgttggcgtgcatctgtaatcctagctacttgggaggctgtgggaggagaattgcttgaacctgggaggcggaggttacagtttaacttcacgtctcccaaactgtgtatcaaggtgccctggagcattgccagatattttaaaatttcaagggtagcacatagacatctcttgaattctgtatgaaatatgttaatcaacgtggcctcttaaggtgtctagttttattaattagaaatagttcagtatgattaaaaattggtaattctgtcttggttattcatttatttgctgaaagcttattagatgtccaaacttttggagttgccctgaatacaggatgaacaaagcagacaaaagtctctaccctcacaggatttctattcctctggtaggagacagagaataaacaaggaaatataatgtcaaacattatgccacagagaaaaccaaagtatcctaaaggggatagagcttctggtgggcatggatctcatgaaaggaggtacctgggtggcatttgagaagatactgggagaaggaagaagaaataagccctaacggtactcaggtggagcatgtttccggcggaggaaatgtcaagtgcaaaggttggagccaggaacttgacctagagacctaaggaccttattgaatgagttgggagccactggagggttctgagcaggggaatagtgtgatctgacttagaccttaaaaggaccaccatggccatgctggtgagaacagaatgtatggggcaagagcagaagcaagatcagttaggaacctccagaataatccaggccaggccagacttgctggtcgccaatcactcctgactagggagttttttcattttgttgttgttgttgttttgtttttacctttggatctctaatttgattttctagtctgcagcccattccagtggtgttgagctctgttgggaaatcctacctcatgcatctctcaagctctcctgccaacctatattctcagccttctcccagtgaaattctcatacacatttgggccgtttctttcaatggttcttattacattttatgaaaaatgagaaaatactgaaggattcagagtcatttcaccgggactcatttgtaaaatttactcaacaactcacatgtccaggtgaaatgactgaatccttcaatactttctcactttgtttctctatagaggctgttgcagaggaatagagcaccagcagcaggtgaacgggtcctgttttgcaactgacatgtggtatgaccctggtcaagccacatgatctccctgggcccctgtaatgggcacaagttaatctcatagacttttaggagagaatctggagtctgaatacttggtgccattttacagatatgacccacttccataacaaaacataaaatagtggaaccacgaaactaggagtagactttaaatagtttctgtttattgaaaaaagccttcccaaagagcacatagaactttcaccctcagtctctatcctccagtacagcgaactgtttattttatttattcctttaccctgtaacactatctaatgatagaagcgtaatcttcctgggcccatttgcagaccctctgtaattttccatgtttcctttaattcatggaggtctttgaccaactaaaaaatagcactcatagttttaaaaatgtgtaattcaaaaaagaatgccacgagtaggagacacactcacatgcaattagcaaactgcacatgcacagaactttttatatggatgggctggatgggtttgttgcgtgtttaaggtacatgtaaatagcttaagctcatctatttgcctggtggtatttgtgatggttaaaatcatgggctctgaaaccgtcaacttgttgcccgcctccatcacttgctaggtgtgatgctttggaaaatatactcaacagttctgagcctgttcacacacctataaaatggtgattacatttatttcattaggtttttgtaaggatcaaattctttagctgaatgcctgtcccatagtgggtggtaaacaatgattgccattattattgctgttgttgttattaggtgttatattttattattaagcacagtaattatcaccatcatttatgaatttagttaatttttatggttcctaaagcattttcctatacatctaagcttaggagtcctgtggggcagaaagtgcatatagcaattataatctccgttttatgagcagggagacacagaagtagtgaaactaagtgacttgccaaagacatatagcttgtgaatggcagagttaggtcaaaacatgcaggtcccctgagtcctcgtccaggttaatacctcttttgattttaatgtttttctttattttggttcttgggccattgtctcttgaataaaaactcatcattattagccttatgctgccaggttgggtttgtcattgactcatctactgaatgcacagatcactgaaatgtttgggcacagtactataagaactgtcatattctgcttatttttgttgaatgagatttttcgatttactttttctctttcaagaacttatgacaaaaagcgcttgtaatcttgtcatctcatctgtcagctgaatttaccaacttgctataattgtcccacagtacactgcaaaagagggagaaatgatcagagaatattgtctctgtccacaataaaaatacaaccagttacttgaactgggctctgcctactgtagccctgctttagttaataaaatatgagaacaaaacctctttcttctctccttattttaatattcctatgaaagtaaacatctgtagatgactgagtgaatgttaataaggttgatggtgagagagaaggaaaaacaagagtgatatgccaaagcttggaaaattactaggcataacgtgctattggcacgaaggaccccattttatgcctgtctgaccaatctcaagccttcatcaataaccacacctgattaattacactgtggtagccaaagaaaccagcagaataaaaatgtgcccttttggatggggaatgggcaactacatcatcggtattccttgtggtctgctcttttcttttgaaagacaaagccctggaatgtggtcctactgtatgccaagaggcagtctgtggaagaccatcacctgtcaggctaatctcacactgattcactcactcacttttgtgcaccatccttactaccgttcgaatttaacctcatagagttagcaaagccttagagcaagctataacgtctcatgcctcagttttcctacctggaaaatggagaaaataatgtctacatcatacgagtgttaagaaacctgcgtgagttagtgcctgtaaagcacttagaaaaaacgttgacagacacatacatggtaagcacttaatgcacagttatctattattattgccattgaagatggaaaggtgttttgttcctgggcttatggattctttcttatcttttccttatcactgactttatagattggaaaggatcttgatctaactctactctttttaagcaattttataacttcagttcttgctaaatttgtaacgtgaataaactacaacaaaaactaataatgagaagtatgtttggagtcagacacacctgggtgtttagatctaacttctggttctttattaactaatttagggatatggggcaaatggcttaacttctttgcaccttgtattacttacctctaaatagagaatgatccctaatgtcactgtgctcatctgagctaaattgataatacatatgtaaaagttatttaatcctttatgggtatgtggtaatcagtagcttcatttcataaactttgttgaatgaattgatttaaaaatcctaataataatgatgggccaggcacagtgactcatgcttgtaatcctagcaatttgggaggccaatgcgggcagatcacttcaggccaggagttccagaccagcctggccaacgtggtgaaaccttgtctctactaaaaaatacaaaaattagccaagcatgatggtgtacacctgtaatcccagctacttgggtggctgaggtacaagaataacttgaacctgggaggtggaagttatagtgagccaagatcccactgctgcactccagcctgggctacacagtgagaccctgtctcaaaacaacaaaccctaagtaataatgatgacaaacatttaaaaaatacctactctgtgtctgatactatacagataatacattgcctaatcttcacagcaatcatagaggtagctactattatcaacctcaatttacagaggaagtcaaactaagagaggtaagatagtttatttatgagcacataggggctcatattcaggcagtcttgactctagagcctgtgcttataaccgttataccttatggctttgtgaccaaatcagatattccatcaggtctagcctttggcctggagataatcaacttttttgtttatagagcaaaagtggcattatagaagtataggtgtaaattttgttgttgatggatcttttctttcaatagatttggatgggtggaaataatacacagatatcatttttcttaaaattagcatatcactgcaagttagacttactatacctgtatgaggaaataataaataaaatatattttttaaagtaaattagggcagcttgatttttctgactgcattccggctaatactcacccacatagctgtgtgggtgctatgtaggatgctataagctctgtttgctgggggatatttagcctttgcaatgaagtgtgtggatgggggtgaagattatcaatttaagtatgctgacttatatctttttgtctttagaccccagaagaactagaggatgattctgactttgagcaggaagattatgatgtgcgtagcaggacaagtgttcagactgaggatgaccagctcattgcagggcagagcgcacgggtgagtggacacctaagactttggcttggcacacagggaccgtgtttactaaaatggtttgagggtatttctaaactccagacacgtggtaccccagagattcatgggtcagaaatctgtgctctcatctgaggttgtttatagcaaatcacattttacacagtgaaaataaccaccactgctcctgattcctctaactcctctcttttgctatcactggaaacatagcaaccacatcacagcaagcttttatgtgtataattgattttgttgggtttgggtactagaattagatgatagactgataggggacactggaatactcaaattttgcattggcacagtcaccattgttcttcctgaagtctccaagcttgtcaacacaagaggcaatgacaaatgaggaatcagggcactactttgtttatagctgggctgttgctccatacaatggcctatgttctatgatatctaagaccgtatcttttgaaattggttcaaggccattagatagagaactttttctttcctcatgatgcctgtctactcccatggtggtattcctagatctgtctgccatatgatagaaaaatagagacaaattagaaatattcaagtttaaggcaaggatcaggaagcaacagagagagtaccagctctgcctgacatttgagtactccatgatactgttcaccaatgcatttggtctaaagagcatcctaaatttggatcaatctgatttgctgtatcacccagagagtaggtgtacgtaatcaaggccggtggtaagagatgaaatctttagagactgcataggacgatgaaattttcctccccttaagggctcagtttccaaagagtaaaaacaatcagattatagtataactgagaattagatattctaattttctttgttaagttttatttaaataaaagataatgaatagaaagcaagaggttgagaaagagaaggtaatttaaaatagaaattgggaaacgccagaaagcccacactgccttaagaattatgaaagaaaaataatcagaggttaaaataaagaggacttgagggagatgtttagtcaagaaagactttgtgtctaaaacccagtttctcttatgtgctttatgccctgatattctcactcaacaatcaagtgacccaaaagatataaacaaacattaataggagggatgtgaaggttaaagaatattaaagacaaagcctttgatttcagacagatttggttttgaattataaagggcagcattagaaccatgctcaaagctacatgttgcttgatttttcagtttcagacctctctctaaaatgcgaataacagggttacctgataggattcttatgaagatttaattacttaatatttgtaaaataataggcacaatattagacattcagtaagtgctcgataaagatgaccgtgataattatcatcctttctaagagaaatcctttccgatcacatgatggtgggacaacagaaaagttggcatagagccccctatttcaaaaattccttgcagactctatttaatcccccctaaaatgttgaaaattggaaaggtcagtaacttgaaaatcttttgactctgtgttggcaaaacgtcagatgaattaaacagtcaattcatcttcagaattaagtaaaaccagcattgttatgtcactgacaaagggcaattttgagtaattcatccaaacatgaagcaattcaaagtcaatttaattgactaactgcaactcagtatacatacagcctagtatccactgactagttttcttaaagacaaagacaggttgtacaactcatcttgctttataagcaccatcttgtcaaaatggcatgaacagtcccacttttacaaggaagaatagagtcgcaatatacttctgtttcattgggaacctaattctagtctcatttacattagacttcaagtcaatgatgatgggtggaaatacaatttggagactcctgtctttatcatctattatttcttcacactagtgtcttttctgagagtttttttcagcatgaattataaacagggtccaagatagtaagaacagagcactcctacaaattcagcacttgctcatttgactttgaggtctatcatgtggtctgtacgattaagttgcagcagacagcattacttactgagtcagcctattttagcctgtaattatatgatgacaaatcagagacatggaattatggctgttaagttggaaataagagggtgcattgaattgctgaaatgatagatggtcagacttttgaccagcaaagtgtgctaagttggtccaaattttgaaggaggcgaactttgtctttgacagaggcatttgctcttccctgcagcaagtcctcccatgttaatgatattactttgtgttcacatttagagaaagtctccctttctaaaaatggtaaattaatctataagaaggtttgagtgggagataagcttttagtaaccccatccaacattgctctcaaattctggaattaaagtatttcaaaaatgtcctttatatgcccatatctgctgcttgcctacaacattctgagggagaggagatagggggcggggggcggtttaggaggggggaatgaatgggaatcaatatggatggtggtgatctgataaaatatggaggtgatcttaccctttgatcctagacatgacataatataaactgtttctccacagtctggcatagttaaaataggttagtgacaattgctaggcacttaaccttggtgatacaatatattatttggagtcacacagacctgattttaaatatggacttagtgaagctgtgtgactttggggcaactttcttaacctctccacacttcatctcctcgtatgctaccacataaggtcgtagggagaattccatgataaaatgtatcacaggatttatcatataaatatgtaataattaagttggtggtaatggtgatgatgcttgtggcttgagctaatcattcattagaaggctgactaaataatttcacctaaaagagttggatcattcaggcaatcatgagagtttttacttgagttaatgggacaactacctcaattttccaattcacttcacagctagagactggtaagaatcaaaggacccactccttaactacttattatactgctttaaagtcaagtaagtagaaacaggcacattgagttttagtccctttaattgttatttataaacattcttgtacttgaaacttaatgttagcctcttgctctaggctaagaaatgaacacttgtcagtttggggacccatagacgttaaaaatcatttttttctctggaaattggaagataattatatcaaaatctccttgagatttaaattgaagaatggattcagtgctatctgaatggttgtttccttttatcagtgattttcacttttagtgtaataggtatagtttataacaatcaccgaaaaatggttggtggttcagaggaaaggctgggagggactctggggtagggggaaggaatccttttggattaatatctctgataccactaatttggaaccccacatcaggcagatcaacaatttggagagctgtgctttgctactgtgaaaagcagaaacttcaacctgtcctgggtaatcatatcatacaaacaaaatctgatatgttccctttcctcttggccatgaagataatttttctcatgttcccttagtttgagggaatgaacaattgcatgttatgtattttatattgagtttgatttcaatgtagctggcttctatttttttctagctagaatggccttaatgtgttaacatttcaaactgctgagttacattgataagacctaattaaaactcatgtgttgaattctaatttgattaacttgcaaatttcacagtttgtgatctactgtttatagataacctttttttaaattccagtttcagaaaaggtcaattatgaatttttaaaagcaagagcattttaagaatatttaggaagagacttcagctcattgatagctacataagcagaagcaaatggaaagatgctttcacccaagtcacacaccattaagtgtattatgcaggtcgagcacccctagagtcaaaataatatcttcctttgcaaacttgcattggaggggatagtttttcttcagaattgtgtccttagaatgtgtgtgtccgttctggcaacttctcttgagttatgttaatgcagtgagtggaaaaatgtttaagcagtcaaaagatgtttattaagcttctactctgggcaggatatggcagcctaaaccctagggaagcatataaagaagttagcagtagggcattaataggaattaattagagagcaaagcaaagcagttaatattcaagtgctaaattgtattatggagatgcaagtgctatagttgacagagaagtatacacttttcagtgcacaaattaaccttgtgttgggacaatgaaatgtgcattgcttttcatctggggattgaacattgagtctgggagtctgctggtagttttacggattctttttcagagaagcacctagcgaatgttttaaatgatgctggtttaggacctgtgaggtctaagtaaagcatgattcgctcttctgtatgaggaggacaataaaccaaaaacagcaataggtcatcagaaaggaatagttaaggaaaaaagtgcatatataatttctgtaaatcaaacatatctcaaatatagtggaatagctgtcttgctatgaacacaacattgcaaatgtgagcttacaataaactcttgtatatcaagcaccttttcaaatacagtttttaaagctactttatctttcaagatatagtattttagatatcttaatagtattcatacaagtctggatttttaaatatggattaaaatttacacgtacacacgcatatccaaacatacatacacatgctatttaaagccacatacatgtatccatggaagtcagtagatgtggctactagtaagaagcatctgggcagccacgggttcaaggatacctttagtcaaatcagacaccataggcaactcatgtctatggcatccaccaggatgcacagtgtggcgagcagtgctagtgatatcagtgacccttgccccacttggttgaggaccccaggacagtgggtaagttgcatggccaggcacaactgatgatccagttgtgtagagtggttaagaatgatcttagttcaggtgggtttgaatcctattcctagagcctattgtgtgatattaggaattctatgaatttctctaggcctagatattattattaaaatggggatagtaatagtatcagaatgattaagtagattgttatttgacatacataagcctcagcacagtacccagtacttgtggatatacataaggaatcataacaatcttctatttgtagatagttgcatagaccccgagcccatccctttccctatagcaactaagaaatgagccagaggggtagttggaaaggcaaattaatggcagcagttataatataatgttaatgataattctatacatgcttactttcattttatttgaaaaaacacatattatttaatttgctgcccaccatcaccttttgaggtaattatttactatgcccatattctatctgaagagatcaacgatagatccatgtaacagtgaagtcttaacccatgtcagctacagagcccctgttgaacccagttcttctgagctcacattgcctgatacctctattagaccttagttatagtccttccaaatttattcactcacacagggagaagatttataatttaggaagcatttttcttgtgttattttacttgttcattgcagaaactgcagtcccccaaactgtaccctcttggtctgtcttatggaaaatatgtgcatcctagaagcaggggaattggaagtacctattcacattcccctgtctgtgaagcaggttgcatacagttttgggaggatgtgatacggtgatgacagacatttcattcggggcttgctacctaaatggtgtttaacaaatatagttgattctcattactcctgatagttatgttctataaagtcatcatgaacatttaattagcaaatatttaatcattggtcctaggggaaatacagcagtagattcctcagagctgccagtcaagacattttcttcaactgatcaataagtaactatgtttaatgggtgtttctgtttagacactttatatttttgattcattaacattgaactcacagccaataactctgtaactcatgcctgattgaagcttaactaacacatgtgttttctccataaggcacatgcccgccttctcgtgctcggggacactagacgcacttcagcaccatgcttggagccattttaaacagcaaagttactaacaaaaagcacaaagatatgaaaaatgtagcattaaatagactgcaaaaagtacacttgtttacagtacgagagctgaaaaaggaaggcagagcattgccttgttcaacctcatctgggaatgtgcatgtcacgcaactcaatttttttgctgctctgcccacatttgcaaatgaccacgaaaatgctacaagccttgattttggggttacaagtatattttagagagtaggcaaattggcaaatgaagaatccatgaataagaagactgcagttctcctttttctacattttcttacctagcagttattgaaaatgaacccatgcttcctaattttatcctttatcccattataacttttctgcctacgtactcaaaggctttaacaaggagccgcaggcatgccaccaccctaaaggagatgggggagggctgagagtaggcacaccgtccctggagtgccctgggcaggggatttttgttgggcatctctctgtagacaccttcacttacactcatagaaagtagccccatcctcccccacttggatgctcagatagtgtttaaaattcctatcctttccagcgacagaaggccgtttttctttttttcccttctctgaacagatttcagtgttgaaagaggtgcattctttcatctggtaaaagtttcctgagaccaaatataaaaattgtcaagaatagcttcttttgaacaaacatatgccatcaaagcggcagagaagttctgttattgccagtgcgcacgtagctttggatatctctgtatttttcatatatgggagtgggacggggactttggggagcttatcagcctgtgctcgtggcctccctggaatggagaaagacgtgctttccggaatggcagggtagctcataagcctttgcagggtctggctctgccatccgcagaaggcagagtcaacatacggtctgtacttcctttgtcaccgtcactcacgctttttctgtaacccacgcaggccatcatggcgcaactaccgcaggaggagaaggcaaaaatagctgagcaggtggagatattccatcaagagaaaagcaagctggatgcagaagtggccaaatgggacgacagcggcaatgatatcattgtactggccaagcagatgtgtatgatcatgatggaaatgacagacttcacaaggtgaggcccagagccagggagctgaagattttttcattaaacccagaagtgtagcagtgtgtattagcatgtgaaagcctgctgaaaaattaaaatataccaacgcaaggtggtggtattataaatttacatgtataagtcaaaatgatctgcacttaattcctagcagataggtatatctttttggtcaaggagaatagattcaatgttgtaattattgttgttataattatctaccctaaggcagtcataaaatcaaaccccgagggacgggtgactcatctttggtctgtgctattttgcaatatgcttaagtattattctgaagataaagtgaatgatttgttaatatacctttggaaaaatatgtacctctgtgtgtgtgtgtgtgtgtgtgtgtgtgtgtgtgtgtgtgtgtgtgcgcgcgcgcgcatgtatacatatagtatgttgtaatattagcttgtgatctagcattaatttaagctcacattttattcttacatattaagaatcagatacaacaatctaagattccattgttttcacagagaaattaaagttgtataagatttatttcctttagctctgagctagtacctttgacaaatcaagtgaccagtcagaattttgtcaggagacttttcttcaacaagggttagtgctcttttctatcattgcattttggtctcttctttaaaagaagatgatatctctgccctttcaacacaaaggacaaaccaagggagagcaaaactcagtaggaacctccctgaattttgagtcagaatatcaggtgatttgggggcaagtctcttactctctatttgcgaaatggtgaaataacacttgtcttatcaacttcagaagagagttttaaaatccaaagagataatgcaagtataaattatgctgttatacagatataaactatggttttactgtagtgtttttttttctggaaaacacacatatgcaaagatgttttaatgatttaacgtggcatttgttattgaaataatgtaagatatatgggaatgtcaagacatcatctgatgggtgacaactttttttaatggttgttgaatgcttctaatgagaaaaggctagaattgattataagttataatttaatatggaacatctctgcgtcaccccctttgcctctggccaatatgtactaatgacatagcttggccctttttcccaatattttaaaattgttttttttacttcagtggaatgattttactgttatgaaggagccctttgagacttttaaatgtcattgtattcattagaagttcatatttgtacatttggttagtctttgtggacttcacacatttatttcacaaagcgtaacagcaggaaaaaagtctgagccattatttcagcctgaaacttctacaaatcagacgattatggcagcctcagtcactgtttctcaaggcctgtgatgacttaatttgcttgctttcaacattttattagtactttacctgatggttattatccagtccattaatagcatcacttgaacaaataatctcagtaaagtgaataatgactctggtcatgttactagttttgatcaggagcacattttataattctctagattatataactgtggtcaaggcacagttatgaaagatatatttgaggggtcttgttacatggtgttaaataagacacatgtctgttagtcaaagtatagttttaaaagtgagaagaaggtgtcttcagtttcatagggatttcatatcattatgctgatttaaataatgaaatgtctagggagctactagttacaatttttcccactgcatgatgagtcgttttgtgttctttttgttagggcaaagggaggagtatagtaatgaatgactggagaaccagagtagactgtgcgtttgaaatgcaacacaggaagttgaggcttcattgctgcctccatctgcacagcctgtttttttttttttttttttttgcaaacagacagctgactagtgcctttctttgtggcctctcacctaagttcactatatttgaccttatacattgttattattgcccttccacttgcatattccacttcaaggaggaataattttagctccataactctaaacattcttaagtaccattttctcttatttaaagaatggatgtagctgattaggaattgaaacttggccactctccataatgtgtatgtgtaaagggcatgtgggtacacaataccctggcatttattatcttgttgttttattcttatcactagctaattcattaatttgattcagtaatctcaatgatattcactccattgttattaaaattgggagggttctgcctcattatatgtgtaataacttcttcatggaagataaaactgattaggcctcatgtctttttcccactcagttcttgacttccatctcatggacaatggcagaagcaccatcctgcatggagtgaatgcatgcttttcttttcatgtcatttttcagaaagaaatcgcatgttgctagtcttgtgtcccaataacaaaaggcgtgcagatagcaacagctcaagtttaattgtacagcaaagagcaaagctgtttttagaatcaaacttaagttctaatcttcaacagttttgagactaagaaaaaaaaactttcagagtacaactgactgtaaaatactgagcactagactcaaaaatcatataatcattctatatttcccaaacttgattttctggcttacttcacatgctcagtacctcagcttagggagcgctttactggtctttcagttccaattctctactcatccaggccacatctgctcagtgaagggcaaccatccagcttcctttgcaccaaaagtttcgttagttcctgttttcacaaaataaaaatccttgtgtttgctctccaaggcctacctttcttgacctttaggcttctgtcctaattttgtacatgtttaacatctgaccttacaacctattccaaaaagtacctggaatagttcaacttgtgattctgcagttccacctgagttctcgaaattccccagattcactcagctgttctactgtgctgtcttcatactgcttcagctgattagtgaaatgcagctcattagtaaaatttcccaaacatattcagaagcctctgaaaagtgacttttatggttcgatacatttgcaaataccctttttatgtgctatatctcattggagagtcacatttggtattaacatgttagaggtattgagaaggcataaaaaatacgttggattaactcagaatttgaattttgaatattaactatattaactcagaatatactgaggcatagatttttcaccttagtacttattaccttctcacaaaataaatgtgaattagttcataaatggtgatgtgacagcagtaatgcggtaatacttttccttgactttcttttttggagtgaccacttcacgggaaagactccagatactgacctttgcatcagaattacctatgtcctaaagagagaaggtttcaagaatctatataagtagagataattatatgacttgatgctctttccaaggaaactaaaaacatactccagatgggacaatatgattgctcctgcattaagaacatgagattacccatagcatcttttacaaacccacaaaatagaaaatctggtctaaggtaggaaaacacaagggctgtgggtcgcaattttaaaatggggagatacaaccaacgtggccagtcttcttgtcgatattgtcttccacggataggaagactcaaacttctgacgctttcatggatgtgattttttttttcttttgtttttttgtttgtttgtttgttttgctgttggctatttgtttcttgtttcagtccccacctcacattatctaaatgactgtagctcattttgacttgtgctgtccaatacagtagccactagccatatatgactacttaaattgtttttctattatggtatacatcatgaagtttaccatctcaatcctttgtaagtgtacatttctatggcattcagtacatttacactgttgtgcaaccattaccaccctccatctccagaacatgttcatcttcctcaacagatactctgtacttactgaatgtaaactccccatctgccttccatttctatgaatttgactaatacaggtatctcacatcagttgagtcacacaatatttgtccttttgtgactggcttatttcatttagcataatgtcttcaaagttcatgcatatattgtagcatatactcaaatgcgtttccttttaaaggtttaataatgttccattgaatgcatgtaccacccacattttctttatccactcatctcttaataagcacttgggttgcttccaccttttggctattatgaataatgctgcactgtacatgagtgtataagtatgtaagttcctgctttcatttcttttaagtgtatacccagaagtggaattgcaggatcatatagtaattcttttaaatgtttgaggaatcacaatattatttttcacagtggctgcaccattttacattcccaccagcaatacacaagtgttcaaatttttccacaatggtcaaatttctccacatccttgccaaaacttgttttctgtttttttcttgatagtagccatcctaatggatgtgaagtggtgtctcatggtggttttaatttgtatttccctaatgattaattatgttgaacaactttcctatgcttattggcattgtatatctcctttggaacaatgtctatccaagtcttttgcccattttttagttgggttgtttgtttgcttttttgttgttgagttgtaggagtccttggtatattccggatattaatttcttatcaggaattacaaattcctgataaagaattactattttctctcattttattggtttctttttcactatttgttgatagtgttctttgacacacacaagtttttaatcttgaagttcaacatctttttttttcttttgttgcttatacttttggtgtcatatgcaagaaattattaccaaatccaatgtcatgaagttttctcctgtgttttcttctttgagttttatactttagttcttatggttaggtctttcatccatttttagttaatttttaaatgaggtataacatgaggactgctgctgcttttgcatgtagataatccagttttaccagcaccatttattgaaaacactgcccttttccaagacccaaatcttagcaaaaatcttagtacctttgtggaaaatcatttgaccttatatatatatataaggatctatttctgaactccattctattccattggtctctatgtctgtctgtatgccagtatgacactattttgattatagtaagttttaaaatcaaaaattgtgaggtctccaatttttgttcttttcaagattgctttggctatttgtgttgccttgagagtccatgtgaattttaggatggatttttaaattttggccaaaatgcctttgggttttgatagggattacagtgaatctgtagatctctttcagtagtattgacatcttaatattaagtcttccaatccacatttattgaatgactttccatttatttttgtaatttcaacaatattttgtagttttcagcatgcaagtcttctgactccatggttaagcttattcctaaacattttatttttttgatactgttctaaatggagttattttcttcattttcttttaggatttttttatttactagtgtctagaaacattttgtatcctgcaacttgcctgaattcaattattagttttaccaggactttttttaaagaatcttaagcattttctacatgtaagatcatgtcacctgttaacagagataattttgcttcttcctttccaatttgaatgccttttagttctttaacttgcctgattgcactggctgggatttccggtactatgttgaataggagtggcaagagcaggcatccttgctttgatcctggtcttagaggtaaagcttttattattcaccattgagtatgaataaagtaagctgtgggttttaaaattttcattaagatgaaataaaactgaaacactgtttgacagttttttttaaagctaaaaacctgtggtggtatttctgaggtctctgttatgttctgttggtgtatatgtgtgttttggtaccagtaccatgctgttttggttactgtagctttgtagtttagtttgaagtcaggtagcatgatgcctccagctttgtcctttttgcttaggatcgtcttggctatacaggctttttttgtttcacatgaaatttaaagtagtttttttctaattctgtgaagaaagtcaatggaagcttgatgggaatagcattgaatctataaattactttgggcagtgtggccattgtcacagtattgattcttcctatccatgagcatggaatgtttttccatttgtttgtgtcctctcttatttccttgagcagtggtttgtagttctcatagaagaggttcttcacattacttataagttgtattcctagttattttattatctttgtagtaattgtgaatggaagttcactcatgatttggctctctgcttgtctattgttgatgtgtaggaatgcctgtgatttttgcacattgattttgcatcctgagactttactgaagttgcttatcgacttaaggagtttttttgggctgagacaaggttgttttttttttttttttttttttttttttttttttttttttttttttttgagacggagtctcgctctgttgccaaggctggagtgcagtggcgtgatctcggctcactgcaagctccacctcccgggttcatgccattctcctgcctcagcctcccgagtagctgggactacaggtgcccgccaccatgcccggctaatttttttgtgtgtttttagtagagacggggcttcaccgtgttcgccaggatggtcttgatctcctgacctcgtgatctgcccaccttggcctctcaaagtgctgggattacaggcctgagccaccgcaccaggccaacaaggggtttttctaagtacacaatcatgtcatctgcaaacagagacaatttgacttcttttctttctatttgaatacactttatttctttttgttgcctgattgccctggccagaacttccaatactatgttgaataggagtgatgagaaagggcatccttgtcttgtgtccggttttcaaagggaatacttccagcttttgcccattcagtttgatattgggtatgggtttgtcataaatagctctcactattctgaggtatgttccatcaatgcctagtttgttaagagttttcaacatgaagtgatgttgaattttatcgaaggccttttctgcttctattaagataatcatggtttttgtcactggttctgtttatgtgattaattacatttattgatttgcctgtgttgaaccaaccttgcatcccagggatgaactcaacttgatcatggtggataagctttttgatgtgctgctggattcagtttgccagtatttaactgaggatttttgcatcgatgttcatcagggatattggcctcgacaaccatctgatctttgacaaaccagacaaaaacaagcaatgtggaaaggattccctatttaataaatgggtactgggaaaactggctagccatatgcagaaaactgaaactggaccccttccttacaccttatacaaaaattaactcaacgtggactaaagacttaaatgtaaaacccaaaaccaaacaaacaaacaaacaaaaaccctagaagaaaacctaggcacaaccattcaggacataggcgtgggcaaagacttcatgactaaaacaccaaaagcaattgtaacaaaaaccaaaattgacaaatgggatcgaattaatctaaagagcttctccacagcaaaagaaactagcatcagagtgaacaggcaacctacagaatgggataaattttttataaattacccatctggcaagggtctaatatccagaatctacaagaaacttaaacacatttacaagaaaaaaaacaccaccttcaaaaagtgggcaaaggatatgaacagacacttgtcaaaagaagacatttatgtggccaacaaacataaaaaaagctcatcatcactgatcattagagaaatgcaattcaaaaccacaatgagataccatctcatgccagtcagaatggcgatcattaaaaagtcaggaaacaatagatgctggcaaggctgtggtgaaataggaatgtttttacactgttggtgggagtgtaaattagttgaaccattgtggaagacagtgtggtgattactcaaagatctagaaccagaaataataccattactggacatacacccaaaggattataaatcattctactacaaagacacttgcatatatgtatgtttattgcagcactatttacaatagcatagacttggaaccaactcagatgcccatcaatgatagactggataaagaaaatctagcacatatacaccatggaatagtatccagccataaagaagaatgagatcatattaattgcagggacatggatgaagctggaagccatcattctcagcaaactaacaaaggaacaaaaaaacaccacatgttctcactcataagtaggagttgaacaatgaaaacacatggacacagggaggggaacaacacacactggggcctgtcaagggttggggagcaagggaaggaagagcattaggacaaatacctaacacatgcggggcttaaaacctagatgacaggttgataggtgctgcaaactaccatgccacatataaagctatgtaacctgtacattctgcacacatagcgtagaacttaaagtataaaaaaaaaaagaatctcaaaaaactaaaaagggatttactacaggacccagatattttgctctcagacatttatccagagacgtaaaaacttgtattcaccccaaaccctataccataaacaattacgtcaggtttatttgtaatagtcccacactggaaactactcaaatgtccttcattgggcaaatggttaaatggttaagcaaactatgttacatctatgccacagactactactcagcaataaaaatgcatgcaatgatttggataaacctttagataattatgctgagtgaaaaacagttatctcaaatatttcatactgtatgattccatttggatggcattcctgacataacaaacttgtagaggtggagaagagattcatgattaggaatatgttaggagtgggttaaatggtataaacagtatgagagaaacttgtggtaatagtacggttctgtgtctcaattgtagtagttacatgaagctatacttacacaagtgcataaaaaatagtgaaagatgaatattccctatggattttaccggtatcaatttcctggttttgctattgtactgcagtcatacaagatattaacatgagaaaggctgggagaagagtgaataggacatttctatacatatctctgaatttccacagaatctgtaatatttcaaaataaaaagttaaaaatagaagacaaacttaaataaaattaaacttagttcctcagccacactagccatattttaagtgttctataattacatgtggctagtgactccatattggatagtgcagaattatagaatgaacatcattacagaaattctgttaaaattgctataggcactcggatgtctgaaggagctttagaatccacttgaaacctatgcgatgatagcattaaaagaacatgctacccttgctacataagccaaattcaaggtcttctcttttaaagatatggttattattccacagttattcttcagctaccagtaagggcagccacacaatctgttatgtaagcaaaaggaaatgagtaactttggtcccctacctccagaaatggcacaactattttttttctatttcccttctcttctgttcatgatgtggggaaactgggtcatgtcactaactttgtgctcatttaaagaaacctgggccttgaaactttcttagaagggtgttgcatcatgctcagaacacatatgagatattcaggatttcccagatgattcaaataattttctttattttacacatgactttaactgcattttagtagttcaaaattttttttaatgtttatttatttttatactttttagggtacacgtgcacaatgtgccgattagttacatatgtatacatgtgccatgctggtgtgctgcacccattaactcgtcatttagcattaggtatatctcctaatgctatccctccccactccccccaccccaagtagttcaaatttttatgaatatttagacaatagaatttggtagttgacaatttttctcatgttatttttctgggtatttttgcattctgtgtttatattttatagtaatacatttacttatacagaatttaaagataaaagggaataaaatttaaaaataaaattgttcgggaaaggattaacttttcaatgtattgtccagggacaattggttactggttggaaaaataaagagtgtgattcctatctcaccctatacaaaaggcataaactgtaggtggatttaatatctaaatataaaaaggaaactttaaaattttagaataaaatggaaggatattttcaattaccttgggataaggaagagcttcttaaaggaatgtatgaaaagcacaaacagtagtgtaaatgatgaatacatttgactacaataaaattaaaatttatattttaaaaactgtaaaaaaaagaaacctaacatatagaccaagactaggagtaatttgcagtataacaaaagatcagaatccaaaatatctgaagagcttagataagcaatttagaaagagtcaatagaaacatatgcaaaagatttgaaaagacaactcagagaaaatatataaatcattaataatgatcaataaatgatgaagagactcagtctcctctgtcataacagaaatgaaaattatttttttaataaccatcagcttgacaagaaaaagtaaatacattttaacgtctaaacgactgaacatatctacagaaaaataaatatgccactttccgcctccttctgggctcaagcaaacctctcacatcagcctccgagtagctgggactataggatggtcttgagcccctggcaagtgatctaccagcctctgcctcccaaagtgctgggattacaggtgtgaggcacctgtcagtatacgactttaattaaagtaacttgtacaactatcacccagctcaagaaaccttcataaaccttttctaagtcccaatacctttattctcgactagttgtaactattaccttgagctttttcaagatctgatgacggtctacaggggaaaaagccctgaactttgtagcatttgctgatgtccaggaagtaaatattcccattatggcagatttcaagctcccaacatttcaactggcttgcccagttcctaaaaacctaacaaataattctcgtatgtataagcctactccagcactcatgtcaattctgtcatttctttgggttttttcttctttttgtctgtgtgtgtgtaccacctaagtgagcatctttaaatagttttgttttagttgcttctgggaatatcaatattatgtaactgaatgaaattactttccttctgatattctggaagagtttaaatagcattgagattatcttctctttaaaggtttagttaactcctgtaagaaaccacctggatttaatgacttttttctttctttctttctttttttttttttttgatgagttctatctgacaactttgtttcttccatggaaatcagactgttttgatttttcagaatctcctttctggtctgttttgataatttatattctcctagaaacttatttcatctgttttcacatttacttacatatatttgagaaagcagctttgtgatacatttttttgttttctaaggttattgctgtcttatcttttttacttttggatatttttctcctattatttcttgatagtgttctaaatatattttctatatctttttggtttagagctagttttaggatttatccataatttctagtgttttgttttctgacacattaatatctgtttgtaattttattagtttttttccaacctcttctttctgaattcttgagccatctatttagttagtgttttttgtaacttcgtgtgtattaatgtatgtagttaaggctacttgtttttctctgagcacgttactttagctgttaagaatgaatcatatttagaaaaaaagtgtactaaattatgattcaggacacacagacttccatcctgtttctctctgtgcgtagcagtgtcatttgggcatgttactttgtcttcctccctagatttcagcttccccaactggaaaatgagaaaatatttgatctcagaacttctattttggtctctaattttatgaaatataccctcatacccatgttgcgactccagtaatttgaattgagtctacaacatgaattctaaagtctcaaactttttttttcctaacatactagtaagtctatgaactgtagtctccggtgtaatcaaaaagacatgcttcttttcattctttgtctacaatatgggggcctgagcatcaagcagattcaggatctatatagacattcttcattaacttggaacattttgtcagaatcaatcagctggtggaagttattatggaacgttcatgaggaagcattttccaagatcctttgaaattcttgaaatacacaattgttagcaatgcagaatcaaacagaatgcagtcttattgaatgggttaagatgaagttacaacaaatattgtgtcagagtaaacatcagaaaatagattttctaaggtctagaagttacaaagaaatatgcaataatgagaatattattaaacattgacagattctgtatccaagtgttccttaaaaaataaaaaccatttattttgcgctaataaaaatatgttagggaatagcaaacagattgtcacagaatgtttaactcatccatattacataaaattcacaagtgaaattactgtctgcattttaaaatctaagtagcaactgcaaaatcaaactactttgtggaagagttaacgtcactacaacaaaatgaaataccttaagttgtgtgtctgtctttgtatttaaacattaatagaaacccagtatattttacttatactgactaatgtagaaaaatccaagaaggtgagttagtagagaaatggaacaaaatatcattcatttacattagtttactgaaagacattttgtcttctattttataaaatgttattatgtaacaatagcaatcattgccctctctgtataaccctacacggtctgaataaatcccttctgaatagtttttctgtacagctcaccacatttctaactacaggaatgtaatcttacagccttaaaaaacacattgatttttatgcacataaagagaccaggttaattaacgatgctaaaaatgataaacataatttattctttacctctcacaataagggaaagaaaagttattacatgctatattttgtttaaagatttatgatgcagcataatttccatttcccttataataaatatttaaaagacatataatattaaacacttcacctaattgcaaaccttatatgaaaatattagggtgatggtttggaagcacaaaaacatttactgtcactcagtgctttgtacgttctttcataaatcagtatcggaagcccacaggccaacaaaactctgaaattctggccaaacagttcccagttatgtgcaagagataattgcttctcaaagtgccaaactggacttaaaatttaaataatagaatataaatatgctggacatgagtaggaagataaagcatatgcatttattttggctagagtctgcttaaaattttgaattttttacttatgacctgtataagcttggataagttactagatcattttgggctcattttattttctaaatgggagtgatgatacctactttgtagagttgttataaagtcagaatgaggtagtctgtacaacagcttttggtacacggtaagcaactataaaattttcatttctcttgtgatgatcttttataactggccattgtttagaaatatagaacttaatgtaaaagataaaatgtgaacatgcacataaaaatatgggaaaatatttccaaaaacgactactaatatagaaactggagttaagcaggaaaatattcaaaattcgactaatgtggccagtgccaaataaaatacaacactagactcctggacaaaggatatggtaggttggtctctttcccgtcattaagtggatttctaattatgttgtatatgttgtttcagaggcaaaggcccattgaaaaatacatctgatgtcattaatgctgccaagaaaattgccgaagcaggttctcgaatggacaaattagctcgtgctgtggctgatcaggtaatagaagagggaagggtgggcacatgctgagtggagtcactaattagcacttgggttttgtaactagttttatgcaccctataaaatgcctctgaagaatgaatcagaggggagaatcactgatattttacacactggtatctgcctctcctgacactgtgctagtggcaaacgtagatttagctcaggagagaatgctaaggcttctgaccaaaattccttgagaaagaagaacatactacttaggagacatcagcccctgaagagtcacggattgtcccaggcttccccattcagaaaggcaactatactgcataatgaaggggggaaaagcaggtttttaaattttcattgttaggctcttggtttaaatatattttcagagattcctacctaatgccctcttttgtttacttcatggtgcttatcacatttaaaaaatatatatttattattgctttacttttattttctgttgcccccaggaaatttaggttgcacattttaactgcctgacagaatgaataaaggagagaaaagagcaacctgccttgtggtcagggaactgaattagcagagctttagggatgtgatgggtcatgatttgatggtttctttaaaaagttgtcgcggactctaccaggagtagaatggaaactgggggtaggacagtcaggggcatttggagatcaaagggcagaaacaggttgcagaatctgggagaacatcatgtttttaaatgtagaaataagaaactagaacttcaccttttcttatttaatatggctctcactctaatgatattcttcataataacttatgctccaccataaacgggattattccacatgatcaagaaccttcagatttcagctttattctaacccagactcagaagcatcagagataaatgaaattctcagagtatctcttaatgctttcaaaccaaactaggatatacattaaaagagttctcaccttgaatgtttatttccatacttttcgttttatttggcttgaattggaactttaaaatcctgttctaaatgttttgttgcaattatggtccatttcttttaagagtgctttaggtagtagacttttccaggtaactaacagttatccctataagcaatagtgatttacagtttgaaccactttggatggattgtatcataaaatataagttttggaaataaaatattatatatgctactatctacatggaaatattaacatgaatttgcttagtatactgcagtacattgatgcaagctggagatactgaaagagaattgcatccttctccatatatggctctagtctctgatgatctgatgatttttgagtctttgtgttgcttattgtagttttcctccctcattcctatatataagggttgctcctctaaatacttactgcctcagcatcccaggctctaacatccttcattcaagtcaataccaaattcacacacctttaaaggctgaaaaaacaaaacaaacaaaacccctcatgattttactatcaggattgcacttaagagtcaagagtcaacgaattctcattttaattttattttacatttaagatggctaatccaagaaatttttttaacttttgacttttggagaaatgcttattggttgagataactcaagtactatgagaatttgagaactgcttacaatttgtaggtgttgagtgttaacccattgctattgcctaatttcagggcaatatcaaccatgaggcttcacagcataaactgagggttttttttgacagacttccataagtattccagaaagttcatgtagaggagggaagagacaatgaatttacttgaaagtatgcatacaaaaaaattaccaactagaaaaggccacattctttttctgcagatgttgagaagagttgggacgtgtagagtgaccagaaattggccatccaccaatttgttaggaaggacttcttgggagtgaaaatgagcggagtttgaatggctgtttcattacactttaaatctcaatggtcaaaagtatttctcggcatctttaggcccttcaagttcaatagttttggttgtgacttttgtttttgattttacctttttgggcttttattttcaactatgcaacctaaagcataactcaaaacagttgatatgtgaaaaacacatcaaacacacacacacacacacacacacacacacacacacacacacacaccccccaggatacatttattttgagattcagtgacagagtatttaaatgctactatttcacagtgactcaaaataaacggattaagtttaaacctaatcctctttgtggcattattattgtcattagctgtgaaataacttgcaatttttgataaagaaatcttcagaaaaaaatgttatcaaattctgcacctatttccatgatttaggagttattttccttgattcaacatgcctttttaaatgtgtattttaactgctttggtttaaataatagaatagaatgagtattatcaaggactggattggttacatttattttgccggaaaatattttataaagatttgagatatgcatgccatataaactttttacggactgttgcatttttaattactgttccattgagatagaactttcagtttaatttgctgcaaggtatttgtatcaaaagccttgtcagccctctggggagatatcattttaaagttaatccctttccgtgtatgggtccctggagtaggataaatattacagtatgaagtacttgtaagaagctaaaaacagtctctgtggaattctttcttgataaatgcagttagtgaaaaaataccacaatggtaagtgttaaatataaaaaatatccctttatcatttattcagtagatggttatatgtaatcactggctttacagtattgataaaagaatttcctttcttgagcttgagggaaacttagctcagagtctttctcccatcctctcattctaaataagatacttcagttgtggctgtaggtacttatttcttatagtattaaggatctggtgattttatgtcctttacaagtaccaaattgatacagaacaattaaatggcctggaagtagctcaagctgaacctttgatagcaaaagaaatatgtaggcatctcaattcctcggtagccattggcaatgaagcctcagaaatgttttcaggagtcatgtcaatgtctctagaagtgttcagccaagctctgtgtgtgcttgatggacacccgcctacttcggtcataatgaaaatccaaactccttagccagagttgactccggtgcgtccatcaaaggactctgttgctactcttatgaacttctttcagctggcttcagatacattctgtcaaatctgtttttcttacagtagtcatgaaccatttcagtctctcatttaaaggcaggttattatgttgcttacattttgataaatattaaattccaaaaagtgtaatagattttttataagtgaatgatacatttattagagaacaaaggaaacaaattgattttcttcccccaactaactggattgaaactgtccattatgcttggcagagagtgccacacaaagtgatttacttttagcatcctttggtcctctgcattaaaataacatttcacatagtgaaagttgaaggaaactgtaaaatatttaggtttctttagagtttagaagacagcaggtaaaaatactcataaacatgtatagaagtcccaataaaactttctggaatatcttcaattttcttctgataaaattttattaaagtagagccaaccattctaaactacagtctgtggcctttctaaaatgcactgtgaaaaagttaagttaaatgaatgtaattaaggtatatgacactgaaaacttttcttcctgcagcttttctataacaaatgttagaaactgaagagtacttactaatcaagatcactcttttaatgttttatagtgtcctgattcagcatgtaagcaggatttattagcctaccttcaacgaattgccttgtattgccatcagcttaatatctgcagcaaggtgaaggcagaagtgcagaatctgggaggagagctcattgtgtcaggggtaagctggacttgggcttcacaatgtaaagttcccaccgttgcacttccaaggcaaacattcttggcaacagtactgctaaaaacaccaaactacagtgatttatagggagggctttttttaaataaatgttatcaccattattccagaccttacaataactcacaaagagcaatttgattttccaattaccctgtgtttattctagccttgtaaaatctccattcttcacaagaaaactaattttgtagtctggaaactcattgccaagctgtgactattgtaattatttggggcttttgtatatttactcattgtgagtctacttccttttgttagtcctagtaattttcattctctgttcaggagccagcctctctatgtgtggattgtgttcacatgttagagatgatgaaaacaataggaattcattcatcaggttccaatgcatactaggttatcagtaacccttgaaagccagaagatgtttgaatttaatacaggttgatgtgctgttgccaaaaactaacataattgtcgaacactaacaattatatattctttgctcaatcactgcagtgtttcctttctcatgaaaatataattatctggtccatttttatcaaatgcatagaaataagttcaatgaatatttagaagaatcacaatttcttggcaagatttccaaatatgtgttgaggttcttcaccttggcttcttctcctccctcaacccctttctctcaacacagggtgccatttgttgcaaattatttgcaagtccagaaatgtggctctgacaccttagttcttttcccagtcagacatgatgatgctaccatttcaagtgagtaattaccaggcacgtaatattatcagcgtggtgaataccttatgaaaatcagactagtcacaaagctcaggtcttcctgaagccatttttggaaatttagaagtttggccatttggtaaaaacacgtgaacaaatcattcttgaacccaactgtttttgttcccatattgtttgagttgcagaaaacatagctgggaaaagaactgatctggcttgcatagagacaccatctggaaagcctgtttcatgcagtcccacctagagcccagtaaattggctattttgtgcctcttcccaaagcacagtcacctctttgcatttccaaaatgatcctgcttcaacattcttcagcaaccaagagcaatctgtcttgcaatgtgtcctttctgccaagctggtaattaccaagattctctcgccaagaagtgatcaaatcattgcatcttccttgctgcctttcttatcttcagccttgatggtatagtttcccataccactcagctttcatgtccatctgtatatagcccctgtggaactgagtgctttttgttcagcttgccttgtgtgctttcatttgttactttccaatcttattatttacatggatgcgcaaagcatctttgtggatctcagactccacaacctcatctgggcaatttttactagcagagccgctctccatcatcctctcagtacccattgtttgtcactgcctccaaagcttcatttccattgtctttttctcatttagatgtagtccaaaccatcactggcttttatcacttgcactgttggcttttatagaggtgtttgagattgggaacaccatcaagaagcctgttcccttctttgagtcttgttggtaaagttcataaatccttgcatgggagaaggcttcttttagaagaatgttgttcaacttgataattattctgaggcaaatgcattataaatatttgctatatatgctctgtcatgggcctgctcttggcttcctcatgatttattccaagcttgattgctgtttggtgccacacctacatctatagtctgctgtctttgccaattctgcctccatctttttcttcatgctccttcactgatggccaatggagaaaaaaaatgaatatgcttactgtgcaaaatagccacaaatgactgctttcaaagttctgaaagagtcaagaatgtgagaccccatacacacacattttcaatgattttgccaagaaaattacacccatttattctgtcatgtggcatggcaaagttgctgttttttttcagaagaagccatcatagtttaatgtacaatcaaaaaagaaatacttaaatcttctttcttttttccctgtgtttatacacatgggattcaaagccacggcttctctgaaatatatgaaagcccccaggaaagttacatttgttagaagtcaacctctctacccaaacagaagagatttggacatattatttccattttgccaagaaaaatgattttgatgtcaaaacagagagccacgtttttagtcttatgctggcatgatgaacatatgttaagcaaaatgcgcaattatgtcttatgtcagcgtgtttttgttttatgtgattctatgtatacaaactgagaaaggcctcttgtcttgtgtctgcttttggcttgagaggtggggacagataattcaacaggtcacggaggagaatggatacaaaagctctccaggcatcatgacggcgatctggagaaataaagcagtccaggatgtgtttctgtgtatgctcatccacacaactgctatctaagaaataccattggtttcctacctggcaattaggtttttttttttgtcattggcttaaacctgtctcaaccaaaaagtgacattcttattaaatctcaaagtagaaaatgcatttgtgagccaattcagcttaacccggttactaagggagtaatggaaaagaaaaaatatgatagaattgttaaagtgaaagtagaggaaactgagtttcagaagattaaaccgtctataaattggctttatttatttgcttagtttaatgtttgcttgaattcttaagccagtttacaggcttttttgagaaaaagaatattgaaagcagaaagaaagataaggaggggaggggagggtagaagagaagaggcataaaagaagaaggtagaagaaaagaaaaaagaaagagaaagttaaagataacatgtcttgaattagtttagtgcaagtaatgtccattaaatgtgacagcattatcttatgggagaaaagttaagccatatattttttagtatgtaaatactattttgaatacaaatatgttccagtatcataatatgggtattacctgtatatttaattatcatgtttttgactaatttttgtttgctaggtttcacagggtttaatcagcacctttaaagttaaaaatggagatgtatacatggatctggaaaaataaaaatcattccatgacctttaatattttttagctacccaaagatttatacagagcgtatgattctgaacaatattagaaatactaatgtaggacttttaaattagcatactgaatatcaaacattctgataaacctaataaagcctacctaaactgtttttttaaagttaaaagataacaggagcttcattataacaatgaagtcagaacataacagcaataaccctactttgatgaggaattcaatgttcaggatgtaatttatggccaaatgtacacaaaaatggtacaaattttaatagattttattacatataaatgtctctgtattaacaaaatatttgagtcaagtttggaggtgaggaatgctagttgcttaagtccttgggctgaatgaatggattactgacctattcctgagagattgagaagcttgccctaatatgtacttttgttctttgccatttaaatatctcttttccaaatctgaattcctctcaattgggtttaggggagaggtttgacaaggtgagcaagtttaacttgggacactggtaggatttgaattggtaaagagaagattggagactgaggggtcaattatagtaattcttattgcccacgtttcacattattttaaaaaattggactctaattacaatcaacatgaatattcatgatataggtaatatacattcctaaaaatgttggaaactgataatattcaaatcaactctacctgacactgtcatatattcaaagatgcatatgtgcatacaaacatacaaacacagagcacaattgatttgatatttactcttataccctcaataaaccttagtgaagtggtcaggaactgaacaagattgataagtataaactatctgatccaatacaaattagggaaaagaaaatgtgggatatattttgtacaataatatatatatggtttgttgagatgagaattacattgtatttgaagagcgttgtgttccttttatttttaaaaagtgccagtattttgtaatgagctaaaacagccattgaaacaagaattgcatctaattgtgtagacctgtacattaagcaacctttttttcttaatttttatatcttctattttgtctatagtcaattcttcatgatctccatggatcaaagtgtaacagtaatgaaaaaaatctaaagtgctagctatttcaatttgggtttggaatgcatgttagtgtttcatttgaacaaaagggtagatgttctaggaattcatagcagttcaaaataattttatccagaccttccgtgcttaaaggaccttcccttatgtaggaaaagttgcagtgtccaaacctagagagagtaagataaaaacaaacttcagattgtaaatctggatgttaggcatagtggagaaattgtgacaaatgaaatgagtagttaccttttacagagtaaatggcagtagttctttgcatatactttgctagtaaaatgagttgttgcatgattccatattttccccaaaatccattccccaatctgttgatagtgaaactataaccatttaaattctgattcctgcattaagtcttccttagttacattcataccagtatgaatggtcattgatttctgcacaacccaaattatagacaccctcagagggaaataacctttctatggtttttttcactgaacattcattcccccagagtgttaaaagtgacagtttaccaattcaagacttgtttttggaagaaatgggaagttaataggaattttaatgagaaagtaaaaatttctttgggtgctgggcatcatagaaagctttgtgtcttttgcactgcacctgtgtctgttctctgaattcagacagtcttgtacgaaggagtctggtatactgctccactatagaaagtgactcttcagttacattttctgtgatggtcaccctaaacttaccaatataatcagttatggccattaaaaaaaatcagttattcattgatggaattaaagcagttggttatctaactgaattgtttaatgcatagggaaatactatgttccaatatactcattttaaaataagaaaacatactgtgttgtggcaaagctaggatgcaaatcaagcaaataactcttcttaccttaactggagacatggattgaccttaattcgatctactactctgtggatggatttgattgtgtcacctaaacttgtgggctgacgagtaatttctattttagtttgagggcattactgcttgtaacagcaggagttagtagctttaagaagagtgtcccctgagatatcagtgccattacttgtcattcaatcagtaaaatttcattcctttgggtcttagaattttttcaagttttgagatgctctaattaaaagaagaaaggtaaataattgacaacttaatttattatcaattaatgccttagatttcagttgatattctgagaatgatttagtagccaattagcagtaatactttttgaaaacttggaaattggacacatgggaggtacctggatgaggggaggtgattgcatatacagttggccttctgtatctgtgagttctatatctgagaatgcaaccaacctgggattgaaaatatttggaaaaaaataaaagtaacaatacagcaataaaaatagtacagataaaacacaatgtagtacttatataatatttatgtaacatttgcatcataataggtataagtgatctggagaggatttaaagtatacaggaggatgtgtgtaggtttcatgtaaatactatgccattttatatcagagacttgagcatccttgaattctggtatctgctagggtcctagaaccaatcccccatggataccaagggatgactgtatcttgggatatgtgtaaaacccagacaaacctatttaagaagtattattttataaagcttccccataagacatatcctaattttgactacttgttcatatatgagaatagtctgatttcattccaagattttttttaaataatttaaaaatacttcaaataatgtttcaaattattattgctttgagaagtgtcttaaaagctaccctctccccagttttgaaccagttttggatctgtaagagcaaatccaaatacgttcaatgtaatgtttccttacattgaaccaaataattatgggaagccaaagtgttgagtgaagacctttatttagaaatggtgtctgtaaattcagcccctgtaaacacttgaatttttcagttctcagctctagtcaagaaacagattatttagaattggttacttaaatgcattgtgattttttttttcttgtttctactggggcttaccccaggaattcctggactgaagtctgttgaagaaaaaagttgatatgtgaacaaggtgatataatgtgaataggcaaaagagaagggatattgaaatcatatgctaaagattatctggggattttgtcattgattttacacatctttccattaccttagctggttaaaaataagatagaatccatagcaaaactgagtcaggatttttttattcagtactggatttgataacattttgacaataatatttttcttaaaatacatcagtttccataagtcgtttctaatttccaatggcaaacaatcagagattcaaagagctgcatttatttgttgttcacataagaatattttctgattcattcactgaattcaacatttccattgcatccctactatgtaaaaggcacggtgatatattttgactgagttgggaatttaaagtctctttatctctaataccaaataattttcatgaaaaggataaatttttctgtcccttgtgtttttattagactgtgtagtctatgtttattttttttccatttagtttctcagcttactgaaatagggttttcagctagaatagcagagtatctgttgatggctatttctgtgcattcgttgttttcttggtttactatatgctagaaataaaagtgtgtttaacttactgttgtctacattctgtccctgcagattattttgtcaagtgctttttccagcctaagttaaatcatttataaaatatgactttgagtgcagcccttagaaaagaaatatgtgccactttatggcccatgtatcttacaaataagaaagtttccggatgggcaatgtggagtttctttgttcagatttcttttactgcatcggaacacattgtcttactctatcttaaatagtaattttccttctgggctataaatatatctcaaatacttcatcctaattctattttcttgaaggcaagctttcttaattcagacttttaatcttttcttttatcatcaatactgtatcttgttttattagttttctctgaacaccttcatctgtgcagatgccttgctgataatgaaattgactggaactctggctagatgtcctgtcaaatcggaacaacctgtctcttgacctctttcatccattttctttggcaaatctcttttgcaactgagaatatcctggagaagttatggtcaacatcgtcttttaagaaccatgtacgtttgtcagcccaaatttctgtatgtgagacgctaccataaaacaaaatcaaaacatctctttatccgagaacttccaatttgaatctgctgctatccacatttattggagcccctcttattgagatatttctcttcaattataacattttgatcaacttacatgaaaaaaatgcctgaccttgtcttccatgatgaatgcatctgcagattgttcttttggaatgcacatgttattccacctgacttttctcaatcttttgtgctaagaagctaaacaactttttattaacctcaaagatttgagaccagccctacatctgtctggtcagaatgaaattactaccgtgactataataatggagtcttgactactgaaatcttgcaaacacttcatatcttgtcttaaagggctacttacccatttctgaaatatcatgggaagtatacagctaatctacagttggagtagagcttagttttcatgaaaaatgtcaagaggctagatcctgagatttggaaattatctgatcctggcattgcatcctgtatcaaaggcagttttattattttaactaatatcatatataaaggcattattataatatcacaatcaatcatactaaattcacctaagaggtcagcacagttcaccactctgcatccttttgatgcagcctagttttgcattgggttcctgaagtcattttccatttccaaagagacaataggcaattataagaaatgccaatagacaatctaagttcagtttgttttatttcaatattttaaaagtgtttaactccatttttattttaatatcttaatgctgggagaattgtaccatctgtattgggtagtaaaaacttaaggtgtttattggaagaatggacaattgcatcattaatcttaatgaactttaaattttttatgagatgatccaagtaagtttctaatacgtaataatttttaaaactgagaaattgtgctaagtgactaatttatttcctacaatgggaaaaatcagaaaatccctaacttataaaaccaaatgagattgttataaaaaatcaaagataagccaactagtcaatgatccaatatgtaaaagtggagagaaaataaaacttcatagggccattaattgcaaaatctcacacacaaaaaaagctgttgaatatataatttgaatttagacttagaattgttgaaaataaaaataataaatgatacagcaaggaaaatatatgcagagtatcattgcctcttctgttaagtacagaaaaagtcaaatataggcaaaacacccatctttttatatgcaagacttttttttcttttctatttactttaattctttaaagacattctttaaatgtctctaacatttattttgaagtgaaaaatggacatgatgttgccaaatccataatcagtttgaatttagtagcttctgtgtttcaaactgctctctcatctgccaattttgcttaattttaaattgcaattattgtaatacacttatgtatttagtacgctaagaatgatgggcttagaaatagaattatattggcttaaaacagaaaaatcccaaattaagatttttgtttatctgtatatagaaacaggctttggtttttagccatttatgatgccataatttgcaagctattgttttgaatgtctaggtttcctaaatttttttctgtggaaagagatggtttcacttttcatgtattccactagtcagatgaaggccttttatgtggatggtttcaggatgtgcctgctcttcaatagtgtctgttacttttgttttgccataatcaataactttgagtattctattttaaactcctaaattttcattgaaaaaaaatactttagtggtctacatactattctcatgccttttcttgtttttctatgaaaactagacttggtaaataaagctatgactagagcagaaatcgtccatgacaaaaacattttggtcagttggcatcactgggtcatgtaacttgacctctgagagtgacagtgcatttttttatgattgcagaaaacttgccatttgattttttctacagttctgaagatgaactctaactactccttttagttgtatatttgatacacgcagaaaaagtcaagattgtaacattttatattgaaagaatcttatgaaaagactctaaaggtagaaaagggcattggttattggcttatcctttaaattatgcccctcacacaatccacccttgggttaaaaggaacagtcaaaagagttgcaattgtagcaacaatgaatgcattagtccttcagtgatcccaatgaaagaggtaagtatccccttagtagaggaccatgtacagaggttggatgtgcagaggccaaaggcttaaggaaggtcacacagcagggcgatggaacttccaagaaagacatcagggatccccacataccgttccaggctttaagagctgcagcccttgccttctctcttggtgatcttcaacactttaaataggggattcaccccctttgagccccactatagttgtcccattcagtgcctgacaaggcagggtgcatcttcattctcctcccacatggttcctttatctgttcaagagccaatgagaaatcgaaatggccaggccgcttaatgtcaagaaagcccatatgtatatctctttcagcacgtaattccttcatatacctcttttttcccaattacccattccctcttccactccctaatcccttcccaagtagggtactttttttttttttcttttgctctctctctcattctctcttttctgtatctctcggaaatcagacaggagttcagagcactttcactaccttttatgaggtagattgtgatgtcatagatgggggcagggctagtcaactttctacccacctcccaacctgtgctgagggagctccgatcgggagtggaagcagtgattcctccatggtgagtaaattgactttctaatctaatgtctttcattgtaatcatgaattctgaaggcaggggggattggattttagggaaataaaaatgtgcccactgaaggcctcttaatattaaccaactttgggcaaaggacttatttattctttatgtgggtcagaaattccacagcacagatatatcttcaattgtggtctaaacttgagaagtgaaaaaggtatttttatttctttatttctcagtctttcttcccattgggactgaaagtcatggcatatgtggaatgaatccattctatagtctctttgtgagcttcactaaggaagggtagtcagaaggatgtattcttctttgtttggaagatttcagggtcatgaaatatcctttactcatgtttgccatgagaatcagtgggcccttctaaaactgtggaggttaaaatgtgcatgaggatgatacatgaggattatcaacaaatactttgggtgttaacaaataaaagctttctaatgcagtgactaaaatgttcattttttgaaaaaagttacaactcctgcaagtttaaggtcacagccatttcaaggtgtcacagccagatttactacccatttttgttgttgcacgtcctaaccctgatgctgtttcatagggtctcttgctagttaagaggcatgaaaagctgctattgtttcatttgggtttctatatattgctgattagttcttttatatgccttagtatttagaaagaaaagatcaactggagcgggcacttttctccacttctttcctcgttctctcctgggtacctattaaaactatcaagatgcaagcttttgtataaaagggtaaagggagttcatggaggtggttgactttttaagggatatcaaagcactagggtgggtgttcttagaagggtttgaccaccagaatgtgaaaccctgtttttttcttagggtgggatgaaagcatcctggtgtggattatgagtattataaaatatataaagagggtatcatcccttttttttttcctaaatatacatccctggttggctagccatgatgaacatttgtgttggagaattggtttcggtttaaaaatgaagagtcctttctgtctcatcaacggcttctttgttatgcataaatccctgacccccaaagttatacacttttatatttaaaagcactacagctgatactgccctctttagtaccctggggctggggaatgggttttgaagttatttgatacctaagttttctaacctaaataagtgactataacagtaaagatttcaggcctgataaagaaaggtagggccataactggccaataggaagattttgatgacagtcccctgcaggcaacttaatattgcaatgtgggcaataatgccagagtcttatatgttggtttatccctcttaagtctctgacctaccttccattaaaagtactagacccctgaaacccaggtagaagcaaaccttcagtgacagaaaaatctgatgtctaatcatagctcaagtttttaatgtcttttatcaacccctcatacagctgccaggtaagaaatgctcatattttcaaacccttgggacacaatcatctttaaacttcgtgagttaagaacggttgtgttgtgcgcttgtgcaaattcagagagtctatcatggaatgcattgtgcatgcacttatttatcttcatgtgcatgtttcatttatagtgatgttcagtgttttttaaattcatttcgtatgtattaaaagtttaattttaaaatacatacatatattgtgctctaaaggagacagtgaaatggagtggaggttgcattaatttggggtctgaacacttgctatgctagttctatctctgcgcttgacttgttaggtaactcaaagcaaattacttagatctctcgggcctcagtttttctcatctgtaaaatgatggtagatgatcaaaaagagatattctaatgcatccctgctctaaaaatctatggttttatggtatattattgaagaaatggtttatgagaaaatgactgaatagttgatgaaatacagtttttattttgtacatacaattattaaatccagaaaaaacattcagtttaaacaaggttttaaaatgtgctgcctacctgatatactgctatttggttaataatagatgtggctgagccatttcttttaaatagacaacgtcatttgattaatctgctaaatctaaaccacttagaaagttatatataaattgatacctgaagagaggcagaatccatgataggtagctacataatgattttggaagaccgattcatgttttaactccatacctttgtgttattctaattattggggatgtaaaaaacatttactaggtaatagatgtagctgatcttactggggcttcaaagtttaaaattacctatgtaatattgcaggaaatcccaggtggttttggaagggttgataagtagggaattggtgagtatggaactatgtactatgggggataaaaaagtgtaaagccttgctcctgaatttgaggaatgtgcaacctctttgaggagtctgtacatgtgccaagtgccgacttggaagtgaatacagtaagtgccaaaataaatatccctgtggcctgggtgggctggattgcactggggagtcttataaaaagctgatacttttagctagctgagaacagaacggtttagatgtttgtgttattgtatataaaaaggacagggaagcgttccaggtcttcaagaccacagaattgtaaatggagctgaagatatatcttgtgttcagacatgacatgtgtcaaaatcaaaatgtattgcttacagttcaacctcatactttttctgaacccctttcccctaaatcatatgctgactgtactagaggagatacatgtctttggaagaatttaggaggcagcaagtgagtgaattgagtaattataaagatataatcaggcaggcatttggtcagttacacaaaactccacatgatcactcacagccacaactatgcaagagaaatacataacaggcagaggaaggaaagaggaagactctagcttggagatattctggtattgtgataaaagtggaaagagatcatcatttgggggtatcattaacagatttagaaacgtcagatggtgatggaaatgtccatcagctaatgagaatccgtgtaaccaagatgactttataaagcaaacaatttccttgggcactaagcaagaataacatcagtttctccatcctttaacagccaatattgacaaggttttaacactaagtaaaactgaacatgattatgcaagtctccttcccatatactcttgggaataggttattgatttgggtatgatttattcacactgacgaagaacacttaatttgaaagcctctctgttgctgtagacttgcagaagatttgcggtggatattttgcctcacgtagggaaaactgtttttgtatttcttgccattcgagtctcttccaagttattaccttggccattctaaaagactggaattccacgattagaactgctttgttacctagcccctttaccagattataagaacttagtaagtaaacaaggactcagtttagatcacccagtgacatggcttctaatttcctattgtgacatcagaattagcttctagaatttgttttctcaggaaatcactttcaaaggctaaatttttctgtttggggatggtgaagtagtatgatcaaaggtagtttaacaaagcaagactactagcgctagtttctaaaaaaaaaaaaaaaaaaagttcaagcagaagttagattatgtttgtttcaagagaaaaatgatgaggatgacaactgttctcctttcttcctcctaagtgtctctggaggtcattttagaaataaagcatcagtcagagctataattcaacaaattcattgagtatgtaatatgggatattccctgttctacgtatgatgcattcatagaattagcatggaaaacaagcacgtgaactagtaactatgatgatagtaatcattttaaaagacatattgtgaccatttttgtagaaaaggataaaggggtgtaattttttttgagccttcacacataactgaataggagttttccaggtggaaggagagggaggaatatctcagaaaagaaacgaaacatccataacattgaggtatataagtattccaggataactgaagctgaaaatgtcagagagggctggaaagatggagaaaagtaaaagatgtgaggttggtgttggacatcaaagaaattcttctgaccatgctgagtttaatgagtagcattgaaaatgatcaggattatctgcatgccagctaagcaaggggtttgggggagactactaaaatgcacgatcctgggccatgttgcaaaaacttcttgaatcaggaatggtagggagtaggttcttggagtctgtaattaactaccccatcccactccccagcacacaacaggtgattcattttcacaccaaagttttagaatccctgcaaggcaacagaactgactcattctgtttctatgttgttagaagcagtttcagagtaaaaaattaaagtatcatgttattaaaagattttgggaaaaatagtttagggtagtataagcatattctcaagaaaattggtttaaattgtggttaagcatgagaactaagaaagatggttattaaatataaataatcagtgatgctattgaatctccttgaaagtgagacaagaaactgtaaacattcaagagaccatccttcatttttctttgtcatgctccaatacaaggagttaatgaagattgaagctaagttgttctacatcttccaagttgtgccaagataagagataggggcaataatccagagtaacatttgtttggggatggtattcttttgtagggccatttgacttctttaattaagtgaacttccttggaaaaaaaacgtgtatgtcagcattctcatcatgactggaagaaccgaactttcatgcccatgcagtatatgacctatatggtctatgttgaaaatgttaattatgtatgtttaaatcaatagtcacttacaagtgctaaattctttgttgtttgtttttctttttttcgtgaacaacagctgttaccttacacccatcaatctgtgtagaaagttagagaagtggtaaaagacctaaggagagggagatactagaaaggaattttacattttactgagacatgaaaatgagccctggttgagaagaaagtgagtcttagttcacagcaacaaggattgattctaatttagccccctaattgctttgcatacaacgtatcatttccagattgccagaatcttctgtatttattttttttatttgagaatagctttgtttggaagtcgaggattgatggggaaccctatttttaattgttttctgccgttaatttcagtgtcttctcttgggtatagatactgtcactttctagaatcagttgactggtaggaggcagtgcctgccattaagtgaacaaactaaggttgacgacctaaggatatatgtatctatatctaggtatctagatatagatatatgtagttaattttagttcttacagatatctcttgccaatgatctgtggctctgtcattgcccttgttacaccaactaaagcaaatacaaccttgggtggttctaaaaagatgttccaggcaaaattatttacctcaaggcctattcttttacctaaataaatgccaagcagagaacagcaacagctatgtggttttgattgttacagatctgaagaatataagttaaataatgttaaaattataagagtgatattgctattaggtgtgaatttagaaaccaactctcttgtacaattgatgaaactgggcaacattcttaacctccctgggcttttgctttttattagaatagcaatagctactcagagggataattgcccatggtaaatatcaaaatatcaacagttacattaacataaactgaaggattagtatgtgccaggcattgtatgaagcatttaaaatgcactatgaaatatgttttttcaattgtgctctggaggaaatactatcatccccattgaaaatattagaataatgaggttcagaggagttcagaaacttcctggaggtcacaaagtcagtgtttggtacacactagtgcttcaggaagacttctttgatattctccaacagcatggtgtactctttctgtcattttttgtatgacacttaaatgtcattatatttctctcaactagtctgtaagctagttataacagggaatatgtttgaatgctcatttttttccctggttccctgcataatgaacacataatctatgcttaacacattagcttctttatcatcctttcttccattgtagtgagttatcacacccaaaaagtcccaataattgattttgaagtctatcagtcattcatactttcattcatttatttctatgtgaaagcatctgacttcaaatgctagatttcgaaatgcactgtttaactaggatttggggccaaaaatcaagtaattaaatgcaattatttttctagttaacttaatttctttataatttactctgttaaattttcagatatattaaaccctttttaagaaaagattatgccatagaaacctacagaattttttcccaaaaagctgaatgaatcaaattagtaatttattgtaaaaagaaatttgaaagtaacatggttgatttcatttgcccccttatgcaaaggttatgacacacaaattgttatataattatatataaatatgaaatattttaacttaagtctactaaatatttaatgcccactattgtattaaaaatttgtatatagtttcaactacaaatgatgaaacatacaactagagttatttctctctcacatggaatacatctgtctgtagttcagggagagtagagtgaacacagagtcatcaaggactttgacacctcctaactttatggcccatctattctcaagttcatcttttggtctaagatgactgctagtgttccacctttccaattttcatgtaggaagaagaggtgagagggttaaaccaggtgcttcctagctatgttagtaccctctaaggaggcttcctggaaacttccacccctctgcccttcttcagtttccactttcatcaccatacatatggtttgctgcaagagagactggtaaacacaatgttttagctcagcacattgctgctctgattaagattgagatgccactaaataaagagaagggcaaatgaatattagatgagcaaccaagacaggatgctaagaataagaattaaattacccttataagattcaattcgaagtaagcaagaatttggggaatggaaatcaaaatctattcttttttttaattattagactttaagttctggggtacatgtgcagaacgtacaggtttgttacataggtatacatatgccatggtggtttgctgcacccatcaacctgtcatctactttagatatttctcctaatgctatccctccccgagccccctaccccctgacaggccccagtgtgtgatgttcccttccctgtgtccatgtgttctcattgttcaactcccacttatggtgagaatgtgcggtgtttggttttctgttcttgtgttagtttgctgagaatgatggtttccaacttcaaccatgtccctgtaaaggacatgaactcattctttgtttatggctgcatagtattccatggtgtatatgtgccacattttcttaacccattctatcattgatgggcatttgggttggttccaagtctttgctattgtgaacagtgctgcaataaacatacgtgtgtgtgtgtgtctttatagtaaaatgatttataatcctttgggcatttacccagtaatgggatggctaggtcaaatggtatttctagttctagatccttgaagaatcgccacactgtcttccacaatggttgaattagtttatagttccaccaacattgtaaaagcgttcctatttctccacatcctctccagcatctgttgtttcctgactttttaatgatcgccattctaactggtgtgagatggtatctcattgtggctttgatttgcatttctctaatgatcagtgatgatgagcattatttcatatgtttgttggctgcataaatgtcttcttttgagaagtgtctgttcatatcctttgcccactttttgatggtttttttcttcttgtaaatttaagttctttgtaggttctgaatattagccctttgtcagatggatagattgcaaaaattttctcccattttgtaggttgcatgttcactctgatgatagtttcctttgctgtgcagaagttcattagtttaattagatcccatttatctattttggcttttgttgcctttgctttttgtgttttagtcataaagtctttgtccatgcctgtgtcctgaatggtattgcctaggttttcctctagggtttttatgatttttaagtcctacatttaagtctttagtccatcgtctcagccccaaatctccttaagctgataagcaacttcagcaaagtctcagggtacaaaatcaatgtgcaaaaattgcaagcattcctatttaccaataagagacaaacagagagccaagtcatgagtgaactcccattcacaattgctacaaagagaataaaatacctagcaatacaacttgcaagggatataaaggacctcttcaaggagaactacaaaccactgctcaaggaaacaagagaggacacaaacaaatggaaaagcattccatgctcatggataggaaggatcaatattgtgaaaatggccatcatgcccaaggtagtttgtagattcaatgctatccccatcaagctaccattgactttcttcacagaattggaaaaaaaaacactttaaatttcatgtggaaccaaaaaagagcccacatagccaagacaatcctaagcaaaaagaacaaagctggaggcatcacgttacctgacttcaaactactacaaggctacagtaacaaaaacagcatggtactggtaccaaaccagagatatcaaccaatggaacagaacagaggcctcagaaataacaccacacatctacaaccagttttcccaacactatttattaataaatagtgttgggaaaactggctaaccatatgcagaaagctgaagttggatcccttccttacaccttacacaaaacctattcttacaccttatacaaaacctattctttgtagttttttgaaactcaatactcatatttagttgttccgcaaacagtttaaaaggcttttttttctacagtttttagggaattaagataggtaactcctgcctacagcataccagcttttctgggaggtagagggctttgtttcccagtagccttcccttgctgagttatactggcagatagaagctgccaatgaaggctttgagtggcacgatgatccccatcatatgaggaatctgaaaagcactgggaagagttaggcttggggtgcagttcttgcaagtgtatgccctccattgagtggaacaagaactgaatgctgactttcagtagctggctatatgacctgagcaagttgcctcacctctctgagccccattttctcagctgtaaagtgaaaatgatattagtatctacttcattgagttattgttaggattaatggtattgatgtgcaccatacattgagcacagggtccagaatgtaggtgtactaaataaatgagtaggtattttttgttatcttctctccccacaaaagactatatagtcttttggataatattggtgccctccggttcttatatcatgtctaccccaaggaaggtgctggacataacagcagtgagcaaccaacgaatcaaggtctctgctgtcatcaagattgcattcttttgtcactgggagtccttgaggaatcaccgacagagaggggatagttgaaaatacagaaaggaataacctcaatagaagtgaaacagtgattgtcacatttcactctgtaaaacgaatctcatgggtagccaaccaaaatggagattcctgaaatccacagttctgaaactcagctctgagaagggatcaggaatctgcattttattcctaaatctttcggatacagatgattcatggatcacacttttaaaaaaacactggtctaggaagtggaggaaagagaaacctataggctatagtgagaatttctccagacagtttaatccctttcctagtcccttttctaggaaaactgggtttgcttcttcaggctggttcagtctagcctcgtttggataattctttactatagggagcttgttgtagttatccactgtaggatgtttaagaacatctttggcttctcccaactagatgcctgtagcaacttttcttctccagtagtgataatcacaaacatctccaaactttgctgaacgtatcctggagtgggtggcaaaattacccctagatgagaaccataggactggttgaaatcttgacctttcacctaggataaacatactgctttaaatggagcctttcaagtcttccctctggaagggtggaagatggcagataagatagttccagatttagctgccaacctcgtttccagccaggtgtcagtgggtggaggtacacttctctaaaagtcaggcccctgagagcccaccacagtaatcctctagacataacctttctacaaagtacagaggtctagatctacctctttgcctggttatccccaaatcttcctgtcttagagcttatgtatttctattcccaacggtaattaagggtttcagtgaaaatattgtctgaaataaaagtttaaacaaggtaaaatggctttcacttcttactttttacaaacaagagtattgaagttaaaacaattgttttcctaccgcttttttagaaaaccttttcatatgtcattacatatttacctagtctctctgtctctctgtacattttaaaatttttgctcatgcctgtaatcccagcactttgggaggccgaggcgggtggatcacaaactcaagagatcaagaccatactggccaacatggtaaaaccccgtctctactaaaaataaaaaaattagctgggcatggtggggcatgcctgtaatcccagctacttgggagactgaggcaggagaatcgcttgaacccaagaggtggaggttgcagtgagccgagattgcgccgctacactccagcctggcaacggagcaagactccgtctcaaaaataaataaataaaaataaatagttaaaataaaatttttacatggtgagagaatgagtaactacattttaaaaaataagaaaaaactaaagtgatagttaaaataatcattttaataatgttaagaacataaggctaaggatccccttgagattcaaattgcttctgtgtttgttaatatatattatgatgatgagtaactctgccatgttgaaattagtgctgggtgagcccttcaaaccaagcaagttgtaggtagaagctgaagaagttgcatggcttagcattcgttttttaaaagaaaattggagaactgtaacaggcagtgacttcagatgtaacagaaatcatgctttctttcaaagatataccttcggtataattgaagaatttttcctggcattttttaatgtatcagataaaggaataatgatgcaacctttacatcttgtaataaatatggaggtgatttaactttgtcaaaggctagattcacagggactctaagatagcaattgtgccatgaggaaactttcatcttaatattaagcatgatttttagtaggtacaagatactgtatcataccatctccagccctttaatgtttatctttgttccttggttaaaagttgtcatcttattggaagttaaaggtagtacttttttttcaaagaagttttccaattgcatgaacttgaggctttctttcaaagaaaccactaatttttttttttttttttttagcaacactattatgcatttccagtccgctgaggattcgattcctttaatctgttgttttgaaagtttcttgtataactcagcctcgttgcaagggaacagacaatatgttgtccatccatggaggctctttgttggaccaaagagatgatatttccagttttagattgaagggaaccctttggcgcttttgctgaattttccctgaagtacattcactccaggagaaacagactagaaggttccaattaggccaagccctggcaggcacctatatggagaagtatcctggcttattaggagaaccaccttaaatgccctttatttcatcttttatttaaaggcagttggaactgtggtatattgataaatgcactatacctgaggatacaggtcatgcgcttgaatccctggtaattgtctattagctagcaagttcttcctccctaagcctcagtttcctatctgtagaatgatgcgcctaaagtgatgtagtactttttgttgttgttgttgttgagaattaagtgatagtagcatataggagagatctaattggttgggagggtcaatatgttttgaatctggaaaaaaaataaagtatattaaccaatagagaagtactaatcaacttttattgattattaaattgatgcataagaccacctgactgataaataattgatgttcaggggcagcctgcaccaaggaaacataagagaatccttcacagaacagaccatccataatctccatttgtacagcgaatcccagcatgatttatgtggttctagccttagtggagaacataccagcataccagtaaaggtgggcaagaagctacttattcataaagactcagaaatctagctatggcaacatgaccccccccaccccaacacacacacacacacacagtcttggaggacaatgcagtaaataagtaactaaagatttgattccagaataaatggcaaccagatttaaggtggaatcaccaaggacaggctcatcaatgagctgacagctcctattgtaagaatggtctaccttcagtttttggttgaatttctttgtctttttgtgctgcactccaaagccaaatttgagggccccaagcatgtttcctgtgttctatagtttggaaactgtatttcctgaccattctctgtaactggaaaaaaataagatcgtaactaggctaccccacgagtacttcaggtagaagaagaaaacttcttttagaagtacttttctcttgttttgctagggcttatcatgccctcatgctatgctggtcatctgttggaataccctctcctgtggagccaagaccctgggactgaggcaccgaggagttctaataaattaaaatgaagatcccaaaagaacttcccaaaggtacccagaggtgatgtaataatcttttatagtcacagacttctctaaaatttaacaagtattttattttctcacttggacctcagaataactcacaaaagtatattgttattaacccccttttacagttgaaaaaataaatagaaactcaaagagattacagagtgtccaaactttcacagccagtaagtgggacagccaagacttagagccagtttctctaatgtattatcttgtgctttgtgcagtgtaaggatggtgctggtatctctgtgctctgtagactagtggttgaacaagaaatacagggaatagcatgtttcagatggtatagatgataacaggtaatatgtattaggttcttataaattatattatcagcctcacatcatttcgtggtgtgtgctgcatgacacattaaaagattatgttttaaaagtttttaaattttttgataaataagtggtatataacgtttagggataaggagaattagaagttgtatttaattgtatttaatcaagttttctgtgaacatgtagacagcttttttggctgctggcaagaaaatgaaaaagtggaagatgatgttccctgcaatttgactaattcatatctcaggtgaatcctgatggcaagattgggagtttgtacaacttttctccccttatggcttaaggaagttcacctcatgactgcttcgtcacatgactcacgcttgtgaacagttaaaacacatcataaggcatgtttccctccacataaatggcatcaatagccaggaataaagacttagggcaggaaaagcctatggtagatctgcctggtcaaagaagactgcatgttctacccagaaatgaattttatgagccttcaagtagaccaaaaaaagttaacttttctctatttcggttttctcatatataaagcagcaatgatggtattcaacttgtacatgttatgaagattaatttattaaggcaccagcactatacctagcaaacataattctgtgcctcttagatgctggtgctattaatggaggagatggtttttaaattgtggctgtcttttgagcaaagactgatcttgaaatgcttacatgcaaggtacagtaagaggaagaagacatagatacgtattgcaatttggctgaagtttactttctcttttatttctccaaattttactctcctgacaatctcatgtatttgcaagaatgaataggtagtaagaatggatactgaactaggcattgtgccctagctttgtgtctttggacaagcctttcacgtcctatttccccacccataaaattacaatgcttcaacatctcggcaaatatttatggaggactcatatgctaggcactgttttagatgtttgggatataatgggaggtggtgaacaagaaacataaaaatatgagtatataagaatattaaaatagagaaagaatggcaaattaaggcatgaggatggaaatggagctgcaatttgaaaagtatggcttgggtagttttcaccaagatgctgatatttggataaagttcagatggatgtgagggagcaagccttacaggtatctcaggtggggaagagttttctaggcagaagaaatagtaagcgctaaggccttacattgcaaacatgactggtctttctgagcagtaaacaagaaaccagtatttaggaattgagttaatgagagcaaaatcagaagtattgggccccatgtgaagaccattttgatagatttggatttaactcagtctgtgattgggaagccactcaaggttgttgataagataagtgatattgagttcatgtaacaggatcgttctcgcttccatttgagaataaacggggtaaagggtgggaagcaaggaaactagttaggggaagcttttgtaacaagccagtaagaggttctgagaagttggccaagtggataagagtgaagaagatgaaaagagatcaagtaatagatatgttttgaaaatattgctgacaggacatgatggcagattagatgttgagttggagaaaacaggtatagcataagattctgggtgtttaaccaaagcattgggaagaactgtgttgccaataactgagatgaagaggcatgcacgagggtcaggttaggggcaagggtggagttaatcatagagctctcactgtctctggaaggttgggaacagtctacaagaaaaggcttacggatgcttagatcattctcttcatgtcaagaggtggtctttgtgaagataactcttgcaagaacctgaagtataatttagatggaagatagataatagaatggttacaactcattgttaaaagtaataggaaacccctacctgcatctgtgatcgtgtacacagtaatcatttgaaaattatttgaatgtgtgttaatgttagtggtggatttacagctcacaatggaaaaagcagtgaccaggaaaaaagaaaatgatttggagggcattattctgtgtcaactcaaaaaatattttaaagaagacagaaaaagttcaattattaaaaacccatggatcgactgctcaaatttaaaactaatttagttaaaattactgatttttaaactattatactaaagacctcttatgagcccttaaatgatgatagcatttcctcttaattctaatttctgtaatgaaaaaagagttgaaattttaggttaatgtagtgaattattttatatagctacatatgtgtctaacattttacttcaattttctgtgctatagttaagagctcattcgttatgaattatgtgaggagaaattatattagaggtagaagtgatattaatatactcttaattggagcaatgattgcacaggtgacatgagtcaaatcatagccctctcctgtgcagttctgttagttagaaggcccacactggatatggtaaatggttttatgatgattgctaactctcatcaattgctagtgtttgactgagctatgtgttgagaagaatgctgagaccatggctaggatcagtaggaaaaaaggacctgattgattgggcatatctgttaaggataccaatgaagaaatggcagtaaatgtgtcacacactaatcatccttgttttattggttctagaaagggcttagagtattgacaagtatgggttgtcttaaggatgcccattgctttttttttttttttttttgatatatatcttcttgccttttcctggcttttacacccattagcccaggcactgtccttttcaataaccttggatttgttctttggaaggtcttttcatataacctgccatttgctactttatttggttagtaaatgtgtgcagagcaggaccaaaggcagcaagattgttgtacttatgttctggaaagctagttggatgagattttcaagtaatcctaaagaatatgtagattcgaaactgggaatttattggtagacttagatgctgagataaggtcagtcttagttagagatggcaggtgctggcttcagtggtttaagaccgaataaaagattaaaaattatgcatttataacccactttgtagcaaaatacagttaaagatttaggaaacagtgctagggaacccaagtgtttgtgttttgaaggagataaacacagagctttgggagatttggccttcagtgtttggtaggcacttccaaacaagaagggggctcccttttaggggtagtgagggatctcagctggggtctaacagtgtatacctgagaatcgaatgaggtaaggtggtgtcatcctttaccaggtaacaccatttggtttttaatatgagatatttataaatgatattcttaaccaaaatgaatagctggaatttggggaatttaaggtccttgaagtggtcgtataaaatattttatatagactatttattttgatgcttcccaaattacatgtttaaacatcagcttcccaggctagattgcctttcctacaccttctagtagagccaccttgactctctattatcaatattccttaccaagtcctaaatgttcttagatattttaggtgtcacatttttacataaaattcctatgttttcttgcactcagtcttgactacccctttattccatctaaaggattcagtagtgctagaaaagatacataagtgttggtattttcctattcccctcatgaacttctccattccttatccctaaaactgtaatattcaggcactgagaccaagccaagatggtggtagcttcagtaagaagagagtttaaaaaaatctaaaatgctgaatgggggaaactttgaaaggaaaagaaggatgaagatgtaggaaaagagaaacataaattttttaagaccatgtttggactcacctggtgatttaaggaaagatgggtcataataataataaaagctgagatgtattaagggcttaccatgtgccaggcactcaacttcagtggcattatctcatttaatgctttataatactagaaagtgctattttcatttttaattttaaagaacttttatgaggtagaggtaagtttagtggttgttcaagatcgtgtagttagtgatccatccagtcaaggtttgaactcaggctttaagtctagagtccaggtttccctcagtaggagagatgaaaacatgcatgtaagaatgaattaccagtgacagagagtgcacaggagaggaagaaagaggtggggaagaggtgatcacaggaacaaaaggggctggggtcccaaggagaggcagcaaacattcactgggaacggaatctctctgctctctcctcatcctggacctcggtagcaacagagcctttgactagttatttccatacacctgatgaggagaggatcacaggctgcatgggtgtttacttcccccaacatatgaataatgccacattagaacatagctcctagggcttagatgagaagagaagtgaaagaatgaggaaggatcgttccagatcttcagattttgctaattttccaggcatagtactccaccaacctgcacccaaaccgcagcctttgactcttctagtctacttttctctcagtgattatgcattgcatgctggagggtaggagccattttgcaagttattaaatggccttcagtacttagcagcagataccatgttcatacaaggttaggcagttcagaaagggtggggtcatttagtgactttgatccattttatgaaaacatatttctcatgggttcctagataattgttcctcttacatttgtcttctggtcatgatgatatcacctagggagggagaagggtagaaatagagggatcaaaggtagtgatgctctgctagctggctctcctatcggtaaggcaaaaaggaggcttagctccttgcataattatttatgagacataaaccttgggtggtcaagacatgctgatgcacagaatcagagacaagatcaacagttaatgccttatgtattcatgtgacataaggactgtctgcccaagaatatttcccaattatggggggggtgcctgaaagcccattggctcttctctttgttgcataattcctcatgatttttttgttacatggaaaccaataacttagaggaggtctctggcaggagatcctgaagggttgggataagcgagggtgctgaaaggaaggcaaggaaagagtaagtataggaaaagaaggtggggactacctggataaacaggtggccctgttccgaactttccaagggccaacctgtcagtactcccacttatctttgagatttccatgttagaaagaatgccttgtttcgggttgagcaaaaactgtttcacctttattggtgagaaaaaaaatggctctaagccatatttaggaaatttgttgactataattaagatttcatgggcgtccccaaggtttacttacccataattgaaaaaatgcaaatgaagacagttaatcagtggactggccgactatgaagcactactacctatgtaaatgaattaaaaatgaagacacaaaatatgtccagttgagaaagttaccaaagagccaagtggtaaattcctcagcaaggctgtggagaattttttcttagcctgacagcctgcagtgccttcctgccaaggtctttgccaatttaatcttgagccattccatacagatttcctcacaactggccttcagcactggctggttctctggcattacttaaggaagccctgaagaaaagataacagacctcttgtcctcttttctgtgtaattgatccactacttagagctgtaaaatatttgctttacaagatcctgttatcaaatggaatttgaaactctttaggagttatcgcacagaatttcacttatcagggatcagtatgtgttgtaatattaactcttttaatgtggttttgtttgttttgagacacagtctgtttctgtcacccagggtggagtgcagtggctccatctcagctcactacaacctccgcctcctgggttcaagtgattctcctgcctcagcctccccagtagttgggattacaggcacctgccaccacgccaggctaatttttgtatttttggtagagatggggtttcaccatgttggccagactggtctcgatctcctgacctcaagtgatccgcccacctcggcctcctaaaatgctgggattataggcatgaaccaccatgcccagccttgatgtgtgtgtgtgtgtgtgtgtgtgtgtctgtgtttttaacaataaatacaacatatctgtgatggtcacttttacctctaacaccatccttccttgttaaaatatgcaaccaatttttatcacctgatttaaaatcatccccaaaatgttttgcatttctgttaatacttaaatcttctccttaatgatttcattaattagcaactcataatatggtattagtacaaaaaagtgcacaatatgtctgtaaaatcagctgtggaaataaaagcataaatgcaacatcctttagataaaaatatttgtcggccgggcgcggtggctcacgcctgtaattccagcactttgggaggtcgaggtgggcagatcatgaggtcaggagttcaagaccagcctgaccaacatggtgaaacccccatctctactaaaaatacacaaattagccaggcgtggtggcacacatctgtaatcccagctactcaggaggctgaggtaggagaatcgcttgaacccggtaggcggaggttgcagtgagccgagattgtgccactgcactccagcctgggtgacagcgagataacatctcaaaaaaaaacaaaaaaacaaaaaagtcagtatcagacaatatttgatagctaacaaacaatagaaatcaaacaattcaaatacagaagtcgtgatacaatggatgatatatctgtgccataaacagaatcaagtttttttggacaaccctgttaaaatgtctgctcttgggaggtaaataagtttcctttcccacactacttagcagattctgaaggagcaaggtgcctgagtgattaataatgcctgccatggacactatggatgagaatttgtttgatgagaaagagtgagtagactccaacacagaaatgagagcttgctatcaaggaaatgtctttctgtgaacatataaacattctgagataacttaagtgggaaaagatgtgattaggctgaaccttttcaccatgtctttgtttgcttgagttatttattaccctggactttctagaggtttttaaaaagtgttattgatatagactctggaaaatgtacgcaggtatttcaagatatttcaaacatgtcacagtttctaaggacatcaaataggtcttcaaagcctcatggatttttaaaacatgaaatgttcttcttggaggataataggctccaatgctctgggtttctaacctctaattcattaacagcaaagctgacttgtagcaaaatttttttttccttgcaagcaatatgtgactcctttgagggagataacagtttaaatataaataaatgaccagctccagtggaaagattccagtttccttgaggtgtttgctttcaatttattgccaattctcccatcaaaatttcctaccctgaaaacctactctaggtctgaacatgtttagaacaacccccttaaaatcgttcttgttcttatatgttaaagctatgctattcccattttaaaatattgcaaaaggctaaagtggactttacacatatttagggaaatattttagcattatcaaactcattagtgttattggctctgacttacaaaaatgaaaataaaatagcaaggcccaaatggaactggttccttcttccaggcatttctaagccatttgaagtaatcaaagtaaacacctcagttcttttatttcaaaatcaccttccagatggatttggcttattttattctatttagcttagccagcggtcccatgacatttgcattatttttaatccaatgacagattgctttgtgatttggattttcatgaactgccatttatgtgtcattaatttttgttagtagatgatcagcttttttgaaaaaagacatacaatgtgaaaattgatctctctctccatgcatattgtaaatatatgaattcagaacacacagtcaaatcctaattctcttctttaatcgtatgcccggcctccacaagttaacattctaagacatttactatgtcatgtcatctgcaatgtgtcccctacttgttttatattatttttcacttttgacaatactattatttgtttttaaagcaagctgttacaaaatagcatttattttatttctatcttacctcaggaagttcaccattctgaagggtaaaagattgctaattacttaactattccctacttaaccaaggaaggttattttctattcaagtaaaatacttgttgatgacgttatatcttagattattaaaaatatcttagattattaaaaggatattaatattgattttaaaggtcttattctgagaaattttttggtaaatttattgaacttttgtgtatggatttaatctttgtaaaaacagtaaggaatatgaaaggacaaaatcaaacatgttatacacctacagtatgcagaacatcaccctacatgaaacaattgggaagatcaatataagcaaaacatgatttttttaatatttactcccataaatacaactggacctctgataaatcacctagatgtaacatacacacctcaaactcggtatgtccaaagttatactcagcattgtagcacttcaacatcctttatatttccgcaatctaggttgagagcattgatgtatactaagttggactagttaggtatttgagaattgtccttcctcgtcactgttaaccattcagtcaccaacaacctcttattaaagagtgtttagatatcatgcccacaatgaagctgtttcccttctcctatccctacttgactcaaggtaaattgctattccttttgttcatttagcatctcgcatcctactaaaacactgtcatacagtgttaaaacctttagtttgtgtctatttttctcattgtattgtgagctcttgtgtttcagtgcttatgtctatttgtgtttctatacccaacacttaagcacagtagttggcagaaagtattcagtaggtgtctgaagaaatacttggatgatgtgtagatggaaaaatgtagggatagactggaggataaaaagtcagtgataattcaacatttcaagaggtgtagttgcactttcctttgaaagaatgtggttgacttctgcagtcgaattctgtttctgttgaaactgaacacctgttgcagcataagtcctgtttgaatgaagtagcatgcagctaaggacataggctttcagaaatattcagttgataacataagctgtagcaagagtcatttcaaatacttattacgatgttcttcagctttggtgatataaggaattaggctgcacaaatattgataaatggaagaatcacaattcagataagtctttgctccagtctttctgcccattcaaaacacaaaatgaggagagtatagggaacagaaatcttttagaagttgagtggtattaagaagagtaggaatagaggcaggggaaaaaaagacaatgtcctatagaaaggcctataaaacagctctcctgcccctatttgcttttcatggactgtaatagcacaagatgggaggaaacatctgttttcttttaaacatagtattttgatgttttaagagaatcataataattagcagaagtctaatttcctgtggttagggacagcagatacctatgggatggaatagggagaatgagtgtagcagatcttggtagattttgagggctgaggattcatctgctctggatggctctgggaaatagcatggaggaatggtaagatcatgggctcagtggttagatggcctgggtttacatcttggcttcaccacatgttagcagtgtgataatgggcaagctatatgcttctaagtctcaattggtcaagccttgtctcagggctggttgtgagatagaatgaaataaacgaaactcagggaactagttcagaaaacagcacatggtctaatttgttaaatgtatgcccttgtttttaaactagctgaaaataagcagtttctcttaggttagatacaggaacttaatgggatatcctataggaatataaaaggcccttaaccaggaaaagatggatatgtctttctgctgaaaaggcctgtcactgtaattcaggtcagcttgaggaagggctgagaggtggttgatttttgaggccattttaaaactagcaagactggaccaggtaaaggattagatgactaataagagtagctgagccctgcctagtataaatgtgcttcagaataatggagcaaatccaagacaaattagcagagatcagtttccagtgtctatttatttccataagggtgactcaaggccaggaagaacaaggaagggctgagctctgggcagcaacatacctgaggccagaggctatagtcagcaaggatttgggctatgaggatgagactaagaatcacagattgtgagagatgaagcacttatcagacatagccatgatgttaaaaggatgttgccaggtttaggggacaggcttccagcctgttcattagtagaaaagagttcattttggataggcaataactaaaaaacaagacctgagagatcaagtgatgcttcgggggaacattgctccatggtggggttcagatgagtgggccttggagagagatagtagtggtcctaatccctactttgccaatgactgcagggacaacaacttacgttacctccctaagcttcaacttcctcacttattaaatggggagtaataatcattcctacttcgagaatttttgaaaattaaatcacacaattaaaaggactcaatgtcaggcgtctagtaagtgctcactgaattttgattattatgaaaacttatacgtattcacttacctatcttgttgaaaacgccatcattacaataagtcacaaaagagaatgcaactatgttaaataaatgttcctaaacttggtatttaaaaactgttgccatgcagctttattctaatatcttttctttaggaagtgaagttttagccaaccttgccaattggaaaacagagttttggcaccatcttggaaaggcataaagaaacccatttttaaattggaaagaattgtgattgtgctgataatgatctaaatcatgaaagtgcatctacagaaaagggcaaaatgtaacctttggaaattcaactttttttaaaagtcaaattttgtattaactttaaattgggcttattgtttgtggaaatatttgttccagttcagttggctggatctctcacctcctcactttaccttgctgcaaattcaagatctgccttagcaggtggcttgaataaaattcttggctttatatttcaaagctatctcactctcaaacagtgtattaggtttatttacaggattcctgcatcaggtttgaaaggcaaaggggttctgaagaagagacaggctctcatatttttgctgcagaattaaacaccatctatttgaaaatggaatctgtggtaaaaatctccaaatttacttgtaatcccttctcttcagatcagctcaattctcccaagactcactctttggggaccatttaataatacaagagcaatatcatcttgttctatttctactaattctgttgcccaaagcaaatcaatgaaacgtccctgtcatattttaccctttatttactcatagcatgcgatagaattaactaattttatgaattaacattactcatttttgaaacctgacagacttacagagaactgtgcattggccaaaggtgttaggtatttagcttctaaagaaactgtgacttatctgttcctgattgttcccaacattttgctgtctcatctctgtccttcattatttacacttctacctgggggtaagatgggaaagacgaaaaagtaaaattcatgtgagataactggctatgatattaccaaacttgtgtatgacggaagtcctgaaatcactggataaagtaaaccatcaagacagtctttaggtttcattaatccagtggttctcaaactttggcaagtatcagaacctcctggatggctagctagttaaaacaaagattgcaaggttttgattcagtaagttttggattgggcctgataaatgcgatttctaacagattcccgggtgatgctgatgctgttgcacctcagggactaggctttgagaatcaccccactaattcatgcttggcttctctcctgttaacatgaataacctagagtttgcttttccttagctatctttagaaatttgggctgtataaacgaaagagtatggggttcagcagtgattttggtatacgtgcattttgtatggcataatagaagtgatcaagtaagtgggttactccatccatttggttgagttaattcacaaagcaattatataaaacatcttccattgttttccccaatggtcagactacaagcttttctggtgatggaaaaattgagctcatttgattgacatttttaaaaacacagcgcaacattaatttagcttaaataagggatatggaacaaaaagcagccaaaggaacagtatcacagttgtgttagatacaacttctgataacctcaatactgcgtgggacatattttgttaataagaaatgatacgaagctaaagtgaatgccagtcacgtcagatggaagaaccataagatctacagtctctcagtttaaacactttcttagtcacctagcccccagaaggcttaatgcagctacagttcatgaagttcatgaattacaggctacacaacaaataatctctccaactaggaacagcatacttaagaacatctttgcttccttcagttaactgtaattgatatatctcattagttgatgttacaagaagtttgatgaaagatcagactatgctcaaacatccctgaggctggaatgatatttgcagttcagctgttaattcttttctttcactagctcacatgtagactcctggctgatggagagtctaggaaatgcatttttgagcctcaccaatcctgagctcaggatatagaaatagtgtatagataaataggtacttccattggttgggctataacattgagacataaccccagcatctgtgatgcaggcagtgaagcaagaaggttgaagaagatattgaatgatctagtatacagtacataccacactaactacttaaagacagaaaaaaggtaacccaaaatattcctggcctaaaagtctggtgatgggcctctaaacctattctcaagttgtgacttgtcttggcatttttaaaagccatcctatccaacaaggtgacagtacagatgagtagtatctttaaagactaaaacctgtgctagttactggacctctgcatgtatcagctctctcattctaaaagggcatgacgataatgcctatattatagagttgttaacaagagctaagtgggaaaatacaaatttctcataatagtatttggcacatagtaaatactgaatatttcattaatgcatgtatgagaaggtctcactgaatgctatgagatcctgacataagtatcagtatttatataggaggtatactgaggacctgttaatagttaaattgatactccaagctcaattaacacctcatagaagcaagaacacccatggattgttcttctgcctaaatgactgtatcctcaccaaccctgagctcaagatacagaaatagcctatagatagatacttccatttcttgggccataaaattgagaggtaaccccttataactttttttctttagtgtctgccaaatgcttgtccaacatttgagtaaatgtcaccattgctaattaccctaatgtaataatatgagatgttctactttggaaaacttttgttaccttggaattcctacctgctaagatgagggctttgccattagctgtattgagattttaaaaaccttaacttgtgataatttgctccttttcagcaatactatttatttgcacaaggaaaacattattttaaccgtgaaagtacatcaccattttgtgaatttggggcctccattaacccacatgtatctcattcttttcctactctagctggacagtgccacatcgcttatccaggcagctaaaaacctgatgaatgctgttgtcctcacggtgaaagcatcctatgtggcctcaaccaaataccagaaggtctatgggacagcagctgtcaactcacctgttgtgtcttggaagatgaaggctccagagaagaagccccttgtgaagagagaaaagcctgaagaattccagacacgagttcgacgaggttctcagaagaaacacatttcgcctgtacaggctttaagtgaattcaaagcaatggattccttctaggacgataggttttaacaagaaagctttttctttcttttctttctttctttttctttttaattccatttttgtatgcatacctgccagctcgtatgcctctggcatggggaaattaagggaacagtgtctgtttgcatgtaagatgagatgagatcaatactactgatccatctgtagcctgggaaggagacaggacattcctgtactaaggtggcacagagctgtcctttgcaacattctcataaaattgggcacagagttcgcattggcgcaatatttatgggagtgggagggatggggaaaataaacttaactctacaaaagcaaactctaatgcatgcaagaatcattaggttggcaggtatatgcataagtgaaaaatctggaagtgtaatggtagaacataaaacttgtattgcttctgtttcagtgcaaaaatgtactagccaatacgcttaagtgtgtggcccatgaattgaacaatttaaccttgaagtctatatccgtgatattatgtcgatttttaactgaggggaaattaactagtccagcctaaaatgcttcttttaatctgcattctgtttcctcttctagttgtgccattactagtgatcatgtttttttcccccctttaatgaaaacaataaacatctatttgagacaattaaaatccttctgggggcactggaagcacaatacggtgaccaatcttgctttcatttttttttctttttaatttgaaccatgattttgctagaaatagaaggcccagtggtggaatattagagggaaggaaactgacaacgtgtgaaagttagaggcaaatacataggtgtagcttggagtgctggtatctaatataccattgtattcactaactaactcaaaataaacacatttaatcttgacatctcaagtatgttttcttttttaattttttaagtatgtacttaataaagattagagcatcatcttcctgaaaattcattaaaaaaatgcattatgttttggtttttagagattagtaataaaattttagagattagtaataaaatagatgatatccaaataattgtcatttttagagttcacatatttattttgtggtttgtttttccacttgttttcattcactttcatactgcattgaaaatgacagtctttctttgtaatagaagagccaattaatttaaaaatattttactcattttagactttttccttttaagtaagttggaaaaacaggacctctgtcccattattaaaaagtggtgatagtatttcaactatgaactgagaaatggagaaaaagtccccaaatagtcacctgaattctccaaactcctctcattggaatgattgctacaagttatcacattaccatgtctccaaaaggcttctagtaaatatgcatgtttctttcttagcaaagaagtgatgataacacaatgggagttatgaacacctaagcttatgtgcaagatcccaaagggaaggagctataagggagttgtggaaggagaaaaagcttaatctaaaatcttatttagaaatgattcttctcaaacccctgcttactactactggaaaataacaccaccaagactgagaacatttcagtagaggagacaccacggaagccgtacactgattttcaacactaatcattagatcacagataactagcctgcttcattaatttgcataaacattcagagggtgccactgacacacactcacagatatttaaggaaggccttaactgagccaggttctaggctgagcgcaccactagttaaatgtatgggtgacttttctgttagcacataaccatgacataacaagaaaccagcatgccatttttgcccaatgacctgaacaaagaaagacagcttgttcttggcagcatatttttgatctaaggaatctgagtttctcccaaacagcaataaaaatacccttttgagaagtttttcctgacaagagccactcattctgtttttctcctccctaacagatgcttagagaaatggaaagatctctttagcctccccttcttcacaggatctagggaaataatagaaatattaaggggttaaagacaggaaagaaaagtacatcaacctagtgatgatgatcctatagaaagaaagagtcaacacaatgccattcagaagtccccaaggaaatgtaattagcataattaactttctggattcatacattattatttattgggtcaaatattttgcagaccagccaagaagcttttgaattttaaaagtttcttggcaaatcctgaaaaattgccagtaggtatcagaggaatatatagagaatgcccttgactttgacctataaaacattaaatgtttcaatgcacgcttatgaacagtgtttatgtgtgtgtgtgtgttgatttcagtgcttactgagtaagcatcatcactatcctttccatcattgcttttgtgatcaaggaaaacagtaa

SEQ ID NO: 136 - DNA, 97080 bp, Homo sapiens
  source 1..97080: mol_type = genomic DNA
gggtgtagaggaggcaacacaagttttggagtcaggcagccctcagcctccttttctggcctcatgacactctagctctgtgatcttggataagttacttaacctctctgaactgtaattatactatctgtaaagtgatcgttattgggcaagatcaaatgagctaaaacacctaacacattgccaagtgggctggtcctcaagcttgacggcagatttaattaccttgggagctttttttaaaaaacaaacaaaaaacccatagttgatttaattggtctacggtactgaacatcaggacgttttttctttaatagagatgaggtcttgctctgtcacccaggctggagtgcggtggctcaattatagctcactgtaatgtcaaattcctgacctcaaacaatcctcccactttggcctcccaaagtgctgggattacaggcatgaaccacaagggcgggccaggatctatttttttaattgagacagggtcttgctctgtcacccaggctggagtgcagtggcatgatcacagctcactgcagcctcgacctcctgggctcaagcgatcctcccccctcaccctcccgtgtagctgggattacacatgtgtgccaccaacccagctattttttttttttttttttttttgtagagatgtggggggttgggggatgggtctcacttcgttgcccaggctggtcttgaactcctggcctcaagcgatcctgctgcctcgacctgtcaaagtgctgggattctaagtgtaagccactgagcctggtcttggccaggattttttttaaagctactcaagtaattctgtgcagccagtgctaggtactggcctggtaccatggttcccaaactgtggtgtgcatcagaatcacaggttgctgggctgcacccccagagtttctgactcagtaggtctcggatgggactgagaattggcatttggaacagcttcccaggcaatgaataccacgcagagaaccagggctggaggataatcctggtttgctcaggacagctcatgtggagcgtcaccctgtcccaggtgtgccactttacaagcccccctgggtctgactgggagtggggccagaccctgatgggtggggaggcccctgcaggagtgcaggaggcacagttgttgtcagggaagagagagggtgaggtcactgagctgaaacatggcatcaggggcaagagaggcagccttggcaacagtgacccagagcccaggagtaagatgtgtggttggaacccctaggaggccgttagctcaacacaaggaaaaacttcgaccttgagaactgccctgtctggaaacggcaccagcttcctcttctggcagcgagggccctgtccctgtggtggagggcggggtagtcctgctgagctggaggaggaggaggaaggagagatgtatcaactggggcgatctctgagttccctttgaagtctgaaattgcacttccctgcaacctccagtctgcctttaatccagaagctgtttatttagggaggtggccgtctggagctttctcaacagactggctttccccatggtgtttcccttgcctgatacagcaagcggtttacagtcctgggccaaacaggaaggcgacagcgctagacgcagccggcaggtccgcaaggttgaggtgcagcggtgccgcaggtgtcacctcgagagtgcagtcggagagcgccgcgggtgaatgggccaggcaaggcaggggtaccctagggatgcgacgcggggctcctggggacaaaccctgccccaggccgggagggaggagggagcaggagggtccagcccacgccgctggccacatcagagcaccaagagaacaccaactgtttattacaggaattcctatgaaacagctccaagaaaaaacccacacataggaggaaaaaaaataacaaagcaacactcaacagacatggggctggggcttcccccacagtgcgccgggtcctggcgcggggaaggctcagagacccgtcgagaactcgagctggggtaccgaggcactcctcggagacccccccccctccctccagggccccaggcctggcgcggggagcagcggagggggcgaccgctcctcggcagggccccccgagccagcgtcccggccccgcgcgcgtttccaaacttggtcacgctcggcggcggctgcgcgtcccggccctccccaagctcggcgttgcgagtccgggcagggtgggcgggacgaggtgcgatcgccggctcgccttcgctacgcccttgtgatcttggggccacggaggccaccagggcccggccaaggatcggatgccactcccaacctcccagagccgcgccgaagcctcgtgcctgcccaggcttcccggctctccggaaggtctgcgcgctcccatgtccagggcggggccacgggctgggcagcctccctccccgtggcagtggtcagtgccgtgtaagcgttcctagaatcagagttctcctcctcagatcacccgcccttctcaggggcacccagcaagcccttatgccctaggcgctcacccaggctggcggcctttccgccttgctctttagccctgcacctgctcaaaggggtcactccaggacccaccgctgcccaccctcggacagcagggcttccagtccagctggggagtcagagcccctgtgagcccctactgtggtgtgactccagaactggcttttgtctgctgccaaattaaagaccctgcctccccagagtcctccagctccagggtggccaccctccccatccctgctgggtgaccgggagctgctgggagtgagcccatccctaacagcagcagcctgatgaggccagacggggcagggcagtcggcagatgctttgcagtagcccatagctcctcagagttcctgggggactggccagggacctcccacccaggctgggtgcagggctcgtgtgctgggccagcagccccgggggaaggctgagatacaggaggacatggaagggaagggcacaagtgcccggagggagctgaggaagggggaccagaagggagctgaggaaagggggtcaggcagagtctgtgacaggagagatagagaacggacggaggcagagactccaccttcaggccaaagagcctctggtgggggtcatcttgcccttttccatattccaacttttatctgctttctggatttttttttttttaaagggaggttggttcctgcatttccactctttgaccataggaacgcctggctacaaaaggggctgtaattggctgctgcctataggggccccaggtccttcctccaattgcaaggcagcaactccgaagttctaagtcccatggaaagtggcagtggttgggctggactgtggctggaggatcaccgggcctcggttctcaagcaccatctgtctggctgcagctgggcccttcagctgggggccagtgttgctttccagctgcccccaccgggtcagatcatctctggcaaggaagagctgctggcatctggtaggggaaaaaagggatgggaggaatctttttcaaaggagcccaatggtctttcctggtcactggttcctggagagacagttttgggagaagttactaaagacgtaagccctctcctttttccagggactcgaggtcaaccgtagaactctgcctgggtcatccccccattcaaattcctagaaccattccagcttgcccagctgcagggactctggcagcaggagatggagtgaaggaatggaatcccggggtgaagcagctgtaggggagggcttcaacgtgggagggtacctggcccattctaatacgtcatagctcaggggagctaggccacaaagacctgtaggtggagaaaagtaaactgggggcagaacttggtaggactcagacaccaggctgaagagttcctaagactttactcagaagactcattcaggccaggcgcagtggctcacgcctgtaatctcagcactttgggaggctgaggcgggccgaggtcaggggtttaagaccagcctaaccagcatggtgaaaccccgtctctactaaaaatacaaaaattagccgggcggggtggcacgtgcctgtaatcccagctactcgggaggctgaggcaggagaatggcttgaacttgagaaggggaggttgcagtgagtggagattgcaccactgcactctagcctgggcaacagagcgagactccatctcaaaaaaaaaaaaaaaaagaaagaaaagaaaaagaaaaaaaaagattcattcaaagagcacaggaaaaatggaactaaagtggtgttttggtggtgggataatcagagtaggtaggggcagtgaagagaacagggctgtgacctaggtgatgagcatctatcagggtggtaatggaaggaatagaaaagagaatgaaagggggcagtcaggaggagagactgagttgctatccaaggctgaaaagaaaatcttgggtgcagctggggacacgaagcagctctggaagcctaactgcgatggagattcagatgtaggagccagatgcgcagaagtgttgctggtgctataaaagagggcggaggcactgccagagtgggcagtgagaagacttcgaagagggtcaagggcagagcaacaaggagagccagtatttagggagtgggcggagcaacaggagccaggagagaggaaggagaacctggcttcctggggtcacaggagccaagggagggcagcttcaggagagatcaggggagtgcgtgtggaagagcaccataagaatgcagaagatgctaaggccctgagctgctgggtgacctccgagtcaatccgagtgatgggaggggctgtcagcctgcagtggatgaaggaggatggcagggaagactcaaggacccttggtgtttaaggggaggaggaggaggatgtcaacttgcagaaggagctggaaggggacaagctggaagtcctaggacagaaataaatgatgaggtgcaggtacggtggctcacacctgtaatcctagcactttgggaggtccaggcgggcaggtcacctggggtcagatgttcgaaaccagcctggccacatggcaaaaatccatctctactaaaaatacaaaaacaaattagccaggcaagatagtgggtgcctataatcccagctactcgggaggctgaggcaggagaatcgcttgaacctgagaggtgaaggttgcaatgagccaagattgtgccactgcactccagcctgggcaacagagcgagactctgtctcaaaatgaatgaatgaatgaatgaatgaatgaatgatgagcaagtttctgatgtaggggtggtttggacaggacccgttctccctggggaccagtaggaaggagaagggcgtggagatagtagcagcgtggggtgacagtggaggcgattccccggcaggctctatctgggcattccaggacagtgggaagtgggccgcggctttgtgtttgaggaaagcctgaggggaatagaaggggctgcagtgcctggtgggagatgtggtagggagtcaggtggagtgggtgtgggggccagctgcccaggcagagaggagagggcacttgtatttacttgttcccggtttccctccattgtgactatcctgaggcaagtgagtatttctccatcgtctgacacagggccatacctgccacaccatcaactcaagaaagccttgtagatgctgcccactgggaccaaacaagtggctggggaaggccgggcagcttcccctctcccatggtaaacgggggctggaaaagggacagctgtcttggccaactcctggaggaggccttggtattttctttttctccccaagagggtgcacaggaagcgaggaggagaaatggcttggagccctggggcttcagccagaaaccgctgcctcaggagggtttcctcatcctggtgtggcagatcccagcccacccaacccaagcagggggctggagagagttgtgtgtgtgcacagccgggttgagaccacctcagtttttctttttcttttttttttttttttgagatgaagtttcactcttgtcgcccaggctggtgtgcaatggcgcgatctcagctcactgccacctccgcctcccagattcaagtgattctcctgcctcagcctcccaagtagctgggattacaggcgcttgccaccacgccaggctaatttttgtatttttagcagagacagggtttcaccatgttggccaggctggtctcgaactcctgacctcagctgatccacccaccttggcctcccaaagtgctgggattacaggcatgggacaccgtgcccagccagtttttcttaaatcatcctctcagtgtgctacgtgtgtcctggactgtcttctcaactggactgtaaactcttcaaggtcaaagctgattttgttttcctgttctcagcatctgtcataggcaggtgtgctcatcttttgtcaaatgaataaataaccaaaaaagacatgcaatgaactagttcccacgcccgtgtccctgccgcaactatgagggaagacacgtggggcctgtgctacccagttgcctgagcccagcgcctctggacacctgggaggacatgtggggtgcatagtgtggggggccctggccttgggcagtccctgggttgctatggctccaggccttacctcttactgtccttctcgcaggccttcctccaccttgggtgcctcctgacgcctgccccggaagtcttcatctgaaaaggagagggaagctgcctcatcctctaccctgcagggcctcgctcaggcacggcccctagactgggcaagagagctgacccgactctctctgcccccttcatttgggacccatgcagatccccccaggtagacgatgcatgggtccagggagagaggcagcaggacactcaggtgctggccagggtccaccactgagctctgagaccttggacaagttctcccctcgtctttgggcctcaaatttcctcatctataaaatgggatggaaaagctggactatctagatgacctctgaggcccttccagtccttgtttctggatgcctcctgaccctcgaatgtggcatgaggatcagggttcagctgcgggcccaggagggtctgaggcagagtcttctggcccacgtggcctttggaagggactgggtgaaagttgagaagcctctgggcccacagactgaagctgcccagtgcttggttctcaggccgagggtcccccatgggggcaggcctgtctgccacctcacacccaaaagaatattccccagaaacagtacctggcacttcatgctacaggtacacatctaggtggaagtagggctagggccccttttcaggggttgcagaaagggggaagcaatgtcgaccaagtcagggggatccatatctttgggtcacctgcccaccaaccctcagtgtgttcctccaggggacagggcgggtgctcccatgaaacacccaggaactccgctgggagatcaccgatcatagagaagttggagcttacgactcccctccagcctcaccacacgcgtggccctccacatcatccaggaggttggctgttgacgcggcagcccccagcctgccaggccattcaggaaaaccgtcccagggatgaggggacactgccctagtcctcccagtcccactgactctctgccccacccctcaaagctctggaggtacctgacacacccacctgaccccccacacccttagtactgtcccccaggctcattttcctgaggtcagtggtatggccaggccctgacactctcgcccagcttacatctctggggatggagaaacagcttcctccctgtttccctctggctgctgagcctctgctatcctaggccctgtttgagaagcatgaataggagttctgataaaaaggtggaaagccgtatttctactcgaggaagggagggccaacatgcttggagtgaggaggactcgtgcaccagttcaactagagaaatgaagggaaggtttgatattgatggaagaaccactttttctcccaagaagtacataacctcagaccaaaaaaaaagttaataggacaacttctgggcctacagaagggagacaggagctgctgccctgctccctaggcctggtccctggttggcaacgagagacgggcagtggactggtggccaagctcatggaggagaggggaggaggaagggaaggccacagagccgggttccactcccaggggagggcacagctgcagggagtccaacaggggtcttgctccatggcccttggcttccaccacccccaccagtgccaggctggaaaggatacgactgatgcttcaacaagtgtttcctctttgacttcctcattttggtcttctctgagaaggctcgggcaagttcaaacagtttcctccgggtggctgggggcagagagacctgtgagtcattctctcagcagccagcacaccagatggcctcctcccaggtgtgggaaaggccaggggaggaccaaggccccccggagagggagcagggggcaggcaagggtgggagctgaggagggagagatgacaggaatcgcagacccctgaggacgccaccccaggagcaagaggctacatcctgggtcagcctgcaggggcagcacaggacaccctgagccaggcccagggaccgcaggcggctcaagatccaagtattccctccccagctgcaacacactgcaacgcatcttggctcgctttcccgccgccaccgccttcccgcccctcccctagccacctccaaagttggttctgggatttccatgactaatccgagattttccttgaaatggagcctgaaaggatcgcagcctcattcacacatggctgtgggtctgtgtggcggggaggtgagggggagggaagggggcattcaaggctggtaggactttgtggaaagaggtcccccacccccacagaggcttagcaagggcctctctgtgcagtcagctccggccaagcctcctcgagccacagagaacgtgaacatgaggattgcggtgagggcatgtgtggcacgttatttttctgcagacatctggctcaagaggatttaaaacttaatttgtatctagactcagctgtagagggaagtgaggcaggaaggctgagggagccagcctgcgatgaaaatgtcactggttcaccaagagtcagctgcattacatgtgctgaggggctccctcactcctgggaggccacagggcctgtctcagaaaagctggggagggaagcggggcctgagtgggactcacactttcccatgtgtttcagcttgtccctgaataaggcatcttcagacacagcggggttggcgtcgccagttcctggaaggagacacctgctgaaggccggccaccgtggccagccatggccgctgtcccagccctacccacccatctgaggacaaatgcaaagaaagagcaggcttcttccctggccagaagggagtttaaagcaaggaggatgtggagttccaggagctcctctttccccttgtggactttgtttcctcctctgtaaaaatggggagggttcagcggtctactgtgtgtgcagacagccagctcgtgtgtgctcccaactgtccacgcctctgaccaactccatgtttcatgacatcaccttggtagcttgggagtatttccaccatggaggtcaccaagcactacatatcaggctcccgctgcacccagagttggctgtgaaacattcaccagcacaccaggggcctcctgcaccccgacattcatgtgacagtcaaatgaggtgctggctcagagccggcattcacctgtagcaagtcccttgtccttcctgccaggtaagcccatccattgctccctcccagccacagggtttctggctattagacaatgagtaggaatagaatgggactagtcctggagtcagaaccccaccggccacccagagtctcccgggctcgctcagcatccacttgggttttttgctggtttctgaagcccctgctctctgtcctgcaacttggttaatccccagtcaccttgcctgctaagtcccctttgagtcattctgatccatctcagcagccccggtatctctagttaattcaggatcaaggacaagaggctcctgcttaaaactcccagctgcacatctgctgagccctaagctcccagcctgctgcttatgagtcagttccacaggattttctcccttcaagctgggatcagctcagctccccatccctctgctcctccacccccaactccactgcatgatgcaaggtctattccaggcaagagcccttctccgaggtgggcagcttgtgtacatgtggggcagggggcactgactgatgaggggccactgttcgcacacaggcaccaggtcatcgttcccagctgtggctcaacccagtagtctgcgcatcccaggagcactgcagccccctcacccctatccaaccctctttcagccatcagagcttctgagcagaagggcctggccctctttacaggcaattcttacttcccaccaccttgtacacaaagctagaaattcctcttcctccaacacctagggcaaggcccaacagatggcagatattctccagctatgtcatgaatgaatgagtaaactccccagattaatcctgccctccttttttcccatgcatttgctaaaatcagtaagtcctcagctttgctagtttgttctacctgttttctgggcatttctccttacaagaccataagcttccccaggacacagaccaagacttatgagtctctgagccccaccacggggcattttggggtccttttcttcttttttttttttttggagacagggtctcactctgtcactcaagctggagtgcagtggcataatcacagctcactgcagcctcaacctcctgggctcaagtgatcctcccacctcagcctcctgagtagctgggactagaagcacaggccaatatgcccagctaatttttagtacttttttggtagagataggggggtctcattttgttgcccaggctggtcttgaactcttgggctgaagcaatccactctcctcggcctctcaaagtgttgggattataggcgtgagccaccgcacctggccatgtgtcattgactagcctacactcgaggcataggttgagagttcagccagcctatgttacttgaacacaactgtgggctctgaagcccagcagtggctggattggaaagaccccagagctgctaaatggactggatatggagatgggggcagaagcagccccgccagcctgctgaggaggcccaggccccctcccacaatctgttttttcaccctcctctcaaactccaaatatgcaaagcaaagttgggtgtgagctccccactatgcctctaggttttcttccccagaaggcaaagttacctgggacaggagaggaaaagccaaagtcgtttccgacagccacgctgctggatttagatttctgggattcgtatttcaatcgatctggaaaaggaccacattcacaggtcagggaggttagctcctgggctcccaggggcaggctgggctgggacacggtagtttgctagaggctaagtccccagaatcacacatgagcacacacgggcacccaaaatatgagtgcacacatctaccagctctcaaagaaccagcagtaaaagaaactaccgcctgacagccatctcaaatgtcagaattaaaaggactcagagagactgtagagtccaaaccccctcatttaaaaagaaaggcacggccagggatggtggctcatgcctgtaattccagcacactggaaggctaaggcaggcagatcacctgaggtcaggagttcgagaccagcctggccaacatggtgaaaccccgtctctactaaaaatacaaaaatcagccaggtgcggtggcgtgcgcctataatcccagctacttgaaaaactgaggcaggagaaacacttgaacctgggaggcggaggttgcagtgagccgagattgagccactgcacttcagcctgggtgacaagagcgagactatgtctcaaaaaataaaaaataaacggaaaagccttgaggcttctagcacctttgctgcagagctggggctaaccttgggcctcagcccagccttctccctccacaacttgctcctcccccaccaacacaccatcagttacacacacaagctctcacgctgtggccgtcacagggacagagctccacagccctctcgtctcctctaccccaaacgcactcccaccctgcaggggaaaggcagccaggctagggagcagggtctccaacccagagacaacccaaatacctgcaaagttccagagcccctgctctaaagtcttccactcaagagcctcccccgccctggccttcatgaacccagtcgttctgtttccggagctccagacacatcacgcctgccttggggctggggctctgtgaggaggggcagtgctcttctccctgctgccttgtgccaaggccagtgcctggcacagagcaggtgtgcaaagggaagaaggcctaagagtgcacatccttcttcctctgagtcccgagggagaaaggggtgggctagtgacccaggtccccataggcagaattctgaggctcccatgggataacttggtgggagtcatgcctcaataggacagaaagcacctggccccctcagcccccagctcagtgttttcctgagccccaaggctaaagccagcatcacctcccttcttcagccagggagaagtggctgcaggcgctgcccacctctctccagagcgaggaggaagtcgcggttccgttgcagctccttcatgaactcctcgttctgcaggaaaagcgcgatcctctcgtcctccaggtactgcttccagcggctctcctggtctccgggccctggcccagccatggcaggtggacatccctctccactcccaggcttggggcccccagcgttaccctgaggagggaagcgagcatgttgaatgtgtacacacaagggtacatgttgcacaaacgtccacatccctctggttgcacacatgccctgtccaacatcctccagccctcacctgaggctcacacctcctaatggaacctggttgcgagccaaaatccaacggacaggtcagagccattgctgcaggggacacagcagtagcctaaaaactatttttcccccacgccacagaccacctcataccttcatctacaacctgaacagtcctgaaaacaaatctgcagactgtggaacagcctatacgtcaattcccaaactcaaccctctccctgcaccagcagcctcagggtggacctgccccgctgtggggcaccttggggcatgccaacatctagcaagaagcagcctctggccctttcccaagggaggaaggggggtgctctggccctccaccattggccaccccatgcccgcctctctccagcctgaggtgactgctgcagcagacagcctccttaggctgtcaccttccctggatagaacaggaaacctccaggcccaggcaggaagtgaggctttcagttcagcattcctgccctacgaacccagggcaacagaaatagctcagcctgggtttaaacatcaggaagtaaaactggctggcacaaattgtgtgggcaaagagagatgctggacaagcaggtgggagtggaaggcgggggcggcccctgttacctgtatgctgtccagctgctggggcaggatgcggagaaagtcatccggaaggttgcccagcagtggtgggttccagttccgatagcgtctctggcttgtaggggctccagagcccagcgcgtcgatactaggggatggcaggtgacagggaagaggaagtcattaagcccaaccccaggtctcctggccccatcacaccaggtcctcaggcaggtcggatcctgctcagagattcccatggcctccactgcctccagaacaaaggcccgtcactctgtctcatcactggagatgtctccaccagcctcagcgaactccccagccattcatgctctccagtcactcagtgcccttccaggtctctggacctacagagctgtctgtccacggtgcacatgtggaactctgtggatttagccatagatgtttacaaatgtcccctaaagacagcagggatcgcatcctttcatgcttctatcctagcacctacacagtgccaggctcatggtgctgagtgacaggtatggtccaaaggaacagacacataagccaccaacagcacagcctgctgcatgctggtttgctgaggaaggggcatatggggacgccaggatccctacagagggtaaagcagatctgagctccagttctggctcaaccaccagccggcagggtagtcttaggtgggcccctgttccctctagggctcggtttccttatctagaaactgctgcctccctgcccaggtgctggggagcccctcaggaggccgtgtcctgagcaatgttctgaaaacgtgcgtggagatgtgagtgtggaagggatctcgctctcagggtgctctggggccgctctttccaggcccgttgtgtgtgtggcaggagctctgtgccatggcagagccaacagctgggcaaggcagtagaggaagagggggtggcacacaccctccctgacccccaggctcccgccctaccgccctgggcctgagggcagctcggagcccggccaggaggtccccacagctccatggcagcctgcagcgtggcaaccgcaggacacgtgttccgctgaatcaggaaaacggcacactgagaaggcagccgagggccgggcggtgggggctgctctagctctcgggcctggctttgatttggtcttcagctctaggaatcccgcccgccccctcactggaggggagcttttccgggctgccgctgactatggaaataacttcctttccttttctatttcgggcgggtggccggcggcgggggcgaggggaaggggcgggggcggcagcagaagggataaccagctgctaagtgcctggtgggagctcagctcttgcagactggagccaagggaaccccagcacgcctcgtccaccctctccctgcacagacacagggggagagggaatggtctggagagcagcttgcatcacaacccgggactcccattcctaggccaaatttttttctacatcactgccaccttctgtcactgttggaggcttcatttttctccaaaggccagagatggggagagaggaagcctcatctctaagggactcgcagaccaccccaggctacagcagggagggaccctcgccaggggtattaccagttcttgaggtctcagggtcttcatctgggacatgggtgcccacccccaatttaaccacacctcggagccacccaggaaagcagtggagggagaacctcagaggtgcacctggacccctctagccatgaagactccaagtggagaagggcacaaggtggaggaggcccctgttctcagctgagtttccttgctgctaggcctgtggtcctgaaggaaggccaggcccagccccctcccggccccttggctggcactggtagagatgaggtcagcccacagctgcgtgagccagggcacaggcagcccaggcaactccattgtggtcggaaaggaatgtcagaaatgagctgagacgcaaataaaaaaaaaaacttccaaggctgtaattttaacggaaaaacagcaggcggcctgtgtggaagggtccccggggtttcagagactgtctttcagacagatggagggaaggacagactgggggaggggaaggagggagaagctggggaggatttcccagcccagagcctctgcctctggaccccaaaactgcaacttcaagccccatcggacccccaggtttacccatggaacatcagacctgatggaaagggatttcagactcaggacttccaggtaaaatttttggtaagaactggacattgaggtccagagggggttcaagccatgtcccaggacacacacatcatccaggcaaaacctgggcccagggattgtgacatttgaagcatgctccccggggtggccctgcctctctgtgccctaggaggccaatacccacgctcccaaactctgccccatctgcaggttctcggcaccccagtgactggaggtagcagatgggggccaggccattcccccactcaaatctgatctccctcagcagccaaaggaagattcctaaaacacgaacctgatcgtgtcgctctccaggttaaggcccttgaatggctccccgctgtctgcaagagaagacggaagctccctggagggccacagggcctttgatctgcttgcctttccagcctcacccgccgttaggtacttccaggaggtctccagatgagccctctttcctgcctccaggcctctgcaagtgctccttcctttgcctgagcgcctccctgtcctctgcttctccacattactgccaatgtggccttcaggtcacagcctggacatcagtttctcctggcagccttccctgcccccgtgtcttcggcttccctagaccctgatctccttggcagtgtgtgggcaaacaggcagcaccgtattcacctccacatcacacacatggctcagcacgtggttcacacacatagttcaggagtgctgtactcaccacctcatcatacacatggctcagcacctgcgtatggcaggcaatcagtaaatgctggaaatgaatgtcctggatggagggactggacaaggcactggagatggcctagaggcccaggtctagcagagccatcctggggcaaagggatctgtgcctctactgaacactggcctctgggggaagcctcgcccctggtctcaatgttagagctaaacttagaagccagccagtgtagctgggggacaggaaggagcagtaaaccactgattataggtctggtctatacctgggtctgtgctaagtgctccacacacatctcattcaatcctcctaacagtgctaaggtggaaattactattcccatttcaggtgaggcaaacgaagctcagagaggttaagcaatgagccaaaggccacattgcaaaggtgcctgaagaattctaagctaggcagctgaagaaaggggtggggagaacagaccgcttctgtctgactccacaagtcaagttctcctcagggcatccactcccagcccagcaaagccttccatttcctgagttaggctccagaacctcaagcaagagcagtaacttatctaaagtccacagggtctcctaagccttggtctggtgctgaggttaccttgcccccaagtggggctcccatcaccaccctggcccccacccacagcaggctgaacacccagccagagtagggagggaggatgtggcatggatatccataccacatttatactgggattttcagccaagcgtgacggtatgccctgtagtcccagctatttgggaggctgaggcgggaggactgctagagcccaggagttcaaattcaccatgggcaacatagtgagaccctgtttctatttaaagaaaaaaaaatcctttctcttatggcctcagttttcccttctgaaaataggtggaaccactctgcctagcagaaactgaactttttgcaaaagtgtattggaatattaaaaaaaaaaaaaaaggtgggggtggggataggcccggtggcttatatctgcaatcccagcactttgagaggccgaggtgggcgaatcacctgagatcaggagtctgagaccagcctggcaacatggtgaaaccccgtctctactaaaatacaaaagttagccgggtgtggtggcacacatctgtaatcccagctactcgggaggctgaggcagaagaatcacttgaacctgggaggcggaggttgcagtgaacagagataatcccagtgcactccagcctggatgacagagtgagactccgactcaaaaaaaaaaaaaaaaaaagtcaaagaaaggaaaatcatttagcccagggctctgtgatctatcccaggctgcaagtcctgcctaggtctcacccagacccacccactcattccccacctcccactccagtacagcctgccagctcctggtaccactcgtgacaaagatcccagctctgttcctgtccctgactcaaaacacttccctccctcctcccctcagtaactttctaggactctatgagctccgtaagctgcaatcacagagacttttctcattcgggaggtgacaggacacagcagtgaagagtgattagctttaagtcagaatgacctggattcgaactccagctcttagtcttggggaagttatgaaatctctcaaggctcagtttcctcgtccataaataggggtgatgacaacagtgcccgcctctgcattaaatgtgatggtgtaggtaaagaacctgctccgtttctggcattggaagggtgcttagtcaatgctagctacacttgtatgataacagagttcaccactgctctggggctgttctggggagaagggaagatctaactgggacaggtgccctgtcccatcatctccccaccccctcaccactccaggcctgagccattctaagaaacagcagctctagggcaaagaggtcacaccccagctccagcagccccagcacaaatgtggagcccagaaaaacaagcaccccggagacccatgggatcttcctggcaactaccttgattatttatttatttatttatttatttatttatttatttactgagagtctcactctgtcacccaggctggagtgcagtggcaccatcttggctcactgcaacctccgcctccggggttcaagcggttctcctgcctcagcctcccaagtagatggaattacaggcatgcgccaccacccctggctaatctttgtatttttagtagagatggggtttcaccatgttggccagactggtcttgaactactgacctcaagtgatccacccaccttggcctcccaaagtgctgggattacagatgtgagccactgtgcccagcctagcttcattttaagcttccaaattacagagtctctaacctggaagaagtttccagggaccttgcagtctacctccctgcctccagttatcaaactaccttaatgaaagagacttgctctcattgcttaaaaatcctcacaatatccctagcccaaggatggcagctagccattccatcaattactgatgactggctgggaatgctgtgttctgtgttaaggaggatctgaggctctgtcttgactcagcaggaaagagcacagtgatgaatcagccatgtttgctgtgggcttgggaggggaagtgccaatacacattccctgtttgtcattcctactctggcatctcccttgactataagctcccagaaagcagaggctgagctttacttaactctgtgtcccatatggtaccagacataccgcctagcctagagtaggaatttaggaaatgtttgctcttgcaatccttacattttgcaagttctccttggtatctagctaaaatgtctcttgctgcagtagaagcctgttctttgaaatatactgagcagtccagccaagtttcgtgttgtttgtacacagccccagccactgatcctcttccctgccaccctgtgctctgagacatgacagattctcaccggggaggcggagtcgggggagccagagggtagggccggtcgaacacgtgcatgtggtaggctggcggggagtacacaggtgggggctcttcatccgagctatcaggttccaaagtcctttccaagatctaaatcagaggcaacagagaaagaaatattaatcatccctccttgaatttaaataccattcagacaaaatcaagtgtgggagggcaggtataataaaggaactctgtgtgttgctagtgggagtgtaaatcgatacaatcaccactttagaaaactgcctttttgaaaaagctaaacacatggctacctctgaccctccagttctggcaactccacagacatcaaagtgtatgtccccaaaagaatgttcacagcagcattctccctccatgtgcagttcaaatacaggcagaaacaaatacacagtggtaagggtcagggcggtgtgccctctgtggagcgggtaagggtgggaacagataccaggggcactccaggttctggggatgatggttattgagctggtgctgataatgtggaatattcgcactgtgaaactccaccgagctgcatgcgtgtgactcatgtgctcctgtacccatgctattctttgatgataacatctttcataccttctctcaaagtacctccacgtctctgatctcatcttaacctcgaacaacctggcgctgtaggatatggctcattaccccatttgacacagaaggaaactgaggccgaggctaagtgacatggcaaaagccacacgctttttagaactgagtcttcaacttggaccacaagggtccctccttcaggcacactggctgcacactcaggttggactctcagggcggagagtagcaaggggagtgcccgggatgcctgctctccttcccaagctcttgtctttatccaggagccaagaagagggccagggagaggccaaggactgggcaaagtctggggtcctgctccactgaccgacttagattcttccccagaagcccagagaggagtttggggcagctaaacacatggctacctctgaccctccagttctggcacactccgcagacatcaaagtatatgttctcctgcctcggcctcccaagtagatggaattacaggcgtgcgccaccacccctggctaatctttgtatttttagtagagatggggtttcaccatgttggccaggctggtcttgaactcctgatccaccataggggcggcccctgactgggagatccctcaccacacagcccaacctggcctacaccttcgcctcccgctcactccccacaactctgttcccatctcctccaagatcaaagaatatgggaggagctcagaggctgtgaatctcaggtgccccagagcccccagacctcaggtgagtttgcagaagtcaccataataatgctgcctgtataagcctgggctgggccaggcctcactggtacatctctgctcttgagaccagccatgcccagcacacacagcctcccaggggcacctggtgggtagggaagtgagcctgtgcatgtgagcacacatacacacacacgcgcacatgcacacacatgcacacgtgcactctgcagtgctctgcgcttacatagctagctaaacccaaggaggcctcccgccctggaatgcactaacgttctttcctttgaggccaaaagtatttaaacagatgcttttgcaggaaaggaagaatgtagtgcttggcaggccactgctctgcttaccctaaatttccacaagaaaggaaaaaagagagagaacactgtaagcgctgctcctgttccctggcgactctctggtgcctggcacaggacagtgacccagcaggtacctggtgcattctgagaacttgctgctgctgtcccccagcccaggcaccctgtttcccagacccctcttctctgagggatagggctttgggctgcagccttgaggccagcagtggtgggtctcagtggctggcctgggctattcccactgatatgggtcagagtgaggtgggtgagcaggggaggagagcgcagtagaaactgtcccctaaaggaagctgcttggggtttcccctgaccatggctagtggcagtcagccccccagactcagggcaatcagccctccccagccacaccaggaggccccctcctgctcctctgtgcagcctcccagggcagcaagaccagacagacgttcatcagagcctcctggagaggacttgggaaacacagagaagacaggcggccggccaggcaagctccagaatgcagggcccgagtcccaaggagagtaaccccagcagcactgctggcctccctggcctctccctcccactgccaccgccacaaagaggttgttcttctggctctaaaggtgctgaagtttttgggctctgcagcctcctggcttaactcattgtgggtgatggatgcctgccaggtgctccagggggcagggtctaggccatttatctgacaggagatacttctccatggcaaggatacccctcgggccagcccaccatccatcagcccccagaaagggtttttttttccagtcagcagttattgtcattccagctgtggctcataaattttccgaagcactttccgctggctcaggagctgcctgcctatgggcccaggcagagttccaaaggtggggggttggggagactgccaagggaggggaggggtaccgggagggggctcaatttggagagcaagattcttagaaaaacagaagtgcacacacagcaagggcctacctagggggtggtgaagccttgcagaggtctataggactgtgggggccatggacaaaggagaaaatactaccctacctgccagactgtcagggcaaatcagactgcagaaagggtcagagcttgcagagagctttccttccagttcacacttaaagcatatacagttgactctcaaataacaagagtttgaactgcgtgggtccacttataggtagattttcttccacctccaccacccctgagacagcaaaaccaacccctcctgtccctcctcctcagcctactcaatgtgagaagatgaggatgaagccctttacgatgatctacttccacttaatgagtagaaaatatattttgtcttgcttatgattttcttaacattttcttgtctctagcttactttattgtaggaatacagtatatgatacatacaacacacaaaatatatgttagtcgactgtttatgttaaggcttgagttaaggcttgaggtcaacgataggctattagcagtcaatttctgggaaaatcaaaagttatattaaaaagtggatttttgactgcaaggggaggattcactgcccctaacccctgcattgttcaatggtcaactgtatctgcagacacacacatacatacgcatactctcactctctctctctccttctttctacaaagaggatccatattttccaatattccttccaccacctactccaagcagatcaaaggagtggtctcccaaggagagagacaatagaaaactgtacaaagacagcagcaacacgtactcattcaacaaacactccctgagtgcttgctatgtgcgtggattgtcctgggtgctgcagatgacacagggatgagccagatgtcttggccaacagagcttttccacctctaggggaagtctcagcagcacccactaaggaggaaaagcaaggagactttgccctgcaggatggctgatgaacaagggtaataataatgccacagcacaaagtttgtgaggattagaagagatgacacatcgggccaggtgcagtggctcatgcctgtaatcccaatactttgggaggccgaggcgggcagatcacctgaggtcaggagttcgagaccagcctggccaacatggtgaaaccccatctctactaaaactacaaaattagccggtcatgatggcacatgcatgtagtcccagctactcgagaggctgaggcaggagaatcgcttgaacctgggaggtggaggttgcagtgaaccaagatcgcgccattgcactccagcctgggcgacagagcaagactctgtctcaaaaaaacaaaaaaacaaacaaaaaaagaagatatgatacatctaaagcacttaggatgatgcctggcacgggtcgggactcaataaagagtggagttaaatcctgctgggtcctggtcttgtccatggctgcatgtcccagatggccctgtggacaacacccctctgattaacaggctctgtgtgcctcatccttctgcaccaagcacctcaggctctgctgatactgggtggccagatgtccactgaactcgggtgggactggaaaggactcacaacctccagcaggtgggtactgatgcagtacgcaggtcccctctctccagccacttccctggagagactgcttggctatggctcactactgtttccatcaggccacagtcagagggatttaactggcaagtctgattcctcactccctttccgtggctatgctcccaggatacagccgcactctttttcttttctttttttttttttttttttttttgagacggagccttgttctgtcacccaggctggagtgcagtggcatgatctcggctcactgcaacctctgcctcccgggttcaggcgattctcctgcctcagcctcccgagtagctgggactacaggtgcgcaccaccacgcctggctaatttttgtatttttagtagagatggggtttcaccatattggccaggctggtctcgaactcctgaactcatgatccacctgcctcggcctcccaaagtgctgggattacaggcatgagccacctcgcccggccccagccgcactctttttctcagcgtcagggctttgtcaacctcattgatctcctctcactctaggaccctgacagatggtcctgctgccagttccctagccagtgaggcactatttcacctcccagactctgcacaagctgttccctttgcctgcacacccttcccccggcttcactcttcctttgggtctcagcttagggtttcggcttagccatcgcttcctctgggaagtcactcctttctgctgcttccacgtctccatcgagcacttaccactctggccgtcagtacccgactcgcgcttctagtccacactggactgtgagctccaggagggcagaaatttggtctgacttggccactagcggactctacgcctgatgtggagttcagtatgttggggtggggcccaggcacctgcatttttaacaagcaccttgattctgatgcctcctgactcagggtctagtgccacgtctcgcacaccactgagtgggcgctcagtgtttgttgaatgactgcatgatttctgcccataaaataaggtgactgacggatggtacttttccctaggggaagtaaggctgcttgctaattagaacccagatagcggagtaacccaggtcctcttagaggttccagtggtggttggaattacccgggccgtgcccctacctccggggggatgctgtcctccagtggtggttggaattacccgggctgcgcccctacctccggggggatgctgtcctccgagtcggagctgtcctcatagacgccgccgctgctgccaccgccctccaggttcatctgcagcagctggtcgatggtggcgtccacagcgccgctgttggcgcgcagcacgcattcgatgatgtcgtaatccatgttggggaacatggtcttgaagtcgtccatggcctggttgaactccaggcggcgcacctggcgggcaggccggctgttgttgagctcctggggggcggccgtgcctcccccgcccccgcgtgccccggcggtgccacccccgccgctgccgctgctgctccggcggaacaggctggtcattttgcggagccgcttggggaaaatgtttctagccggccgcaaagccccttccccagggtctttccgccgtcagccgcttacttgccctgcggtctcgggcagctcactcctgcgcctcctcctccccgggtagccaggcagcaatgggctgccaagagctccgggttaggagagtacgggcgcggggccccaggcagcccttggagagcggtcctcgcggggcggtggcatgcgggaccgggccgtgctggggctgggcggccggtcatccacacccccggtgcatcctggcaccggtttcacggatggtcccacctgaaaccgaaagagatggagtcagggccgaggctaacaaaacatgagctcagggtggcggccaagggctactaagaaatgagggcagggaaccgcgacccctaccacgggcaagggaggcttgcttcttcctcatgctttctccccggcttcagtaatgaaatccccacagttctttactagcacaggacagccaccagttagcaagggattcctccgacccaggtgccatcctaagtgctctatgtgggccaactcatgacaatactgtaaggtatgtgctagtatgcccatgttgcagatgggaaaagtgaggtatagacgctgagttagtggaggagccaggatttgaatctgggacatatggccctcaagtcactggtctctaccattacacatactgccaaagacccctgaagacctgagtgaggcaggaggggctctttaaagatgtcctgcctctctgatctctagtccctgttctcatcttcccacatcactgccccaacatcgtggtcccaccaccagggcaggaatcttgtgcagagctccatcgaaccccggggacagcagtgatgagaagcgggaccctccagtgtcaccgggagcttccagcctgagagaggaaacagggtttcatccttgcagagcctcgggctaataggggaggcccagttcccactcttggaaaactcatgtcaggccctaaaactcagtccattcccctgagaagcaccagcccaaaagagagatgcaaggccattgtcaacccctggagttcattttccttaccccaatgtcaggccgacatgttttatttatatcacagacacgtttgttcttatggaacactcagtgtccttacatatttttaaaaattctagaagttttttctcaaagttgtcttgagaaaccatatacatcataaattctggttgtttttttttttttttttttgagacggagtctcgctctgtcacccaggctggagtgcagcggcacgatctcggttcactgcaaactccgcttcccgggttcacaccattctcctgcctcagcctcccgagtagctgggactacaggcgcccgccaccacacccggctaatttttttttgtatttttagtagagacagggtttcaccatgttagccaggatggtctcgatctcctgacctcgtgatctgcccgcctcggcctcccaaagtgctgggattacaggcgtgagccaccgtgcccggccataaattctgttcttatccccaccaagcccagttctcctgccccagccaatgtgtgtccctcagcccccagggtcagcacagtgtcctgacaacatgtataggtggaactgaaaatcaagcacaatgagggaccttaatctgccacagaaaaccacccggcccactcaaacccaggcatgtaaatcactgccaaggttgcatttctgttagcacagaccactgggaatggaatgcgcctaaacaccaacttctgacagtggcagctttattttaagggacaattccatcaaataatatccttgagtttgatgaaacaggtgcaaacttgttttcacttttctaggacttggagtcacaatcttaacagctgatacagaaatttttttttttttttcggtctcactttgtcgcccaggctggagtacagtgctgtgatcttggttcactgcaacctctgcctcccaggttcaagcagttctcctgcctcagcctctcgagtagctgggactacaggtacacgccaccacgcctggctttttttttttttttttttttgtatttttaatacagatggggttttgccatgttggtcaggctgttctcaaactcctgacgtcaggtgatctgcccaccttggtctcccaaagtgctgggattacaggcatgagcttcaatgcttggccaagatgtttttgtgagtacatcaacccctgagaaaatctgttcacactttagtgtgtctacatctcgattttttcttttctttttctttttctcttttttttttttttttttttttgagacagagtctggctgtagcccaggccggagtgcagtggcgtgatcttggctcaccgcaacctccaccttccaggttcaagcaagtctcccatctcagcctcctgagtagctgggactacaggcacgtgccaccacgcttggtgctaatttttgtatttttaatggaaatggggttttaccatgttggccaggctggtctcaacctcctggcctcaagtgatccacctgcctcagcctcccaaagtgctgggattacaggcgtgagccactgcgcccggcattattttttctttgcatataccaccataaatgaatttattttactaaaatgtaatcaaaccataaatcctatgcaactagttttttccacataataagatattgtggccatcttcccatgtcagaatacgtagggctacgccatcatttttagtgcctgagtagcattctgttgactgagtgaagcatgatttataatccaactccctctaccccatctcttcccagatgagcaagtcagagcccagagacgcccaagccatttcacaagaagacacagaggggtgacttcaaatgatcagtccaagagttttgctgtgagaaggaacataggaaggtagccaagtatgacatggcttcccatagccggctttagacaccccaacacccctacacccacatctccacgaacccacacacatcagaagagtatgcagcttcgcctgggctccaccctgacagctgcctttgtcctgggctctggggacctgccctcaagcctctaacacagacctcagggccaggaggccccagaagctgatgccttgggctactgtctgctgtcctagtgtcatcacacacaggggtcagtgacttgtgttaaggccttctggagtaaagccatcatctctctgcccctccagtaatttactaacagagatggagggacccaggtctcactctgccaaaggcaatccctcggagaaagatgacctgggccacccccaggggaggaagaaagaagatggcaagaccgacattttccccattagcagccctctggacagctccctcgggttctgggcctctctgagtgttgagaagctccagaagccttgcactcttgccacttatagggaacacgcaccagttcagacaaggcctccgcactccccagctgtgggacctcagacaagtctcccatcctctccgtggccctaagccctcatctggatgtatcccttagggggtttcaatgggaatgaaataagataatcctcagcacactgcctagaacgtggctatgctgcatttgagttatcattgccccaggaggctggtaaagagccaggagcagtgggtaaattggccaagctgccctcacaggggggatggggtagggagattctaggggggtcttccccagcacctggatgtcaatccctggaattctttcagccctctgtaaggaaatattgatcctcatggccccaggggaggctgggctggcctgggcaactggagacacagcagctcaagcagccgcttccatttggcccaagtgcaaagctttgaaagcatccttgtggggaccacaaaatgtaaaggactgacaactccagcccagccccacaccctgcctcacattacaggtgaagagcctgagacccaagtctaggagggagttgcccaaggacacacagcgagtaaaggcaaagtctagacttttctatcaaagggtggttctgtggatgaggagagtggctcagaaacagtaatgggaaacacaaggaagcagtaatgggaagcattttgattaccagaagtaccatttccacaggactctataaggtctcagagactcccaggctgcctatagttagaaccaggtggactatagaggcccccaattctcagagcactgtccctctctccccctggctaagctcagggcagagtctgaggccatggctgtggtgtgcctgggagcagggtcagagccgtccatgccaggctgccttttgcaactagcactgctcaaatgaaaagcagtttaaaatacacgaaaggattaaagcaagtaggcgacaggtttacgagcctgtgccacatgctttcacatttaatctttattacaactccatgagacaggtgttgctgtctccatttcatagctgtgggaaccatttcagagaggttgggtaaattgcccaaagtcacacagccagtatgtggagaggccagaataggaacccacttcctaagaggcaaaaaatgccaagtaaggctcacagggctatgagccaaggagcataagaaattcagccatgtgtgccccaggctcaggagactgggcacagcccagaggacatttcagcacaggaaacatgacccagacagcatggtagcaaggtctcttggctctgctccagagctggctctgtgaccttggagaaaccataccacctctcagaaccccagctgctgagcactggcagggaaacagagggacataacccctgactggcttctgaaaaaggaagcaaacaacccactgggctcatcagacctctcggaggctgactcaaaggctcccctgaactcatggttgtggatgacctggagactgggaagcagaaaccccacacctgtcctcctccaggtcccaggaagccaggatcacagtggccctccacctcccctgtgaaggaatccaggcccggcaggggcggcaaacagccaacctcctctcctagcataagcacgcagccaaggcctgagtcactcccggcttggcccacggaggtgggcaagctgccccagtgcagttcatctggccttgcccaaggtcatcccagccagcctcctgcctggtacatcagggccagcgagggtctgcatgggggctatgagagctggggagccagagtcctgggtgcactttgtgaccttagtaaggctgtgtgacttggggaaattgtttcatttctttgcacctcagctccctcatttgtagacataggggaggagtattaatagaacgtacatgggtacctggcgtataataagcaccagtgacacaggctgctgtggcttggggcacaggcctgggaccttttcccgggctagactcactccctgagcaatctcatccagccccatggcttggaataccatctgcatactgaacactggctctcatgtgctccaacctctcatgggcactcccctcaactccacactcatacagccttcttgctgcctccacttggacatccaacagcagctccaacaacatggatccatccgacctgtgattccctccgaccccaacctgcttctcccctgccttctccatctttgttaatggcaactctccctggctccagccaaaacctttggagtcatcttggagtgctctcattctcttatactctatgtccaatctatggcgaagcctgtcttccccgtcttccaaatgatttctgaatctggccactccttaccacctccacagctaccataccctccctagctccctgcctcccacgtgttggcctagagacccctcatcacaggggtcatgcccttcctctgctccatgcctcccaatggctcccatgtccccagaatacccagagctttaccgtggccaacccacatggtcctgcccatgtcacctcgctgtcatatgtgcacgcacacatacagacagagcctaactctctgtggccacctggatccttgctagtccaccaacgagccaagcacactcccacccaggggcctctgaacttactttttccaccaactgctacgttctgctcccacatatctgcatggctcccttccttctggtccctactcaaccatcaccttgagggggaacagagtggcaagtccaccccccaacatcccagtgttcctaaccctttaggcttccctgtcttcttcatgaaacagaccaccttgaatattatacatttgtcactgatatcttctccactagaatgtaagctccatgaaggcaggggctttgctatactcactgtggtatccccagtgcccgaatcagtgcctggcatggtcaatagacatttattaggcgaatgagtaaagaagggaaggaaagatggaggagtgctgtaactgtggatttccctccctttccttcctcctccggctcacagcaatgatgggagggggccttttcagtttccaaagccctctctcccctacacactcatttactcctcacaacaaacctagaagatatataagggaatgcgttattatctcacttcacagacaaggggtctgaggccaaggcagcccagtgacgtggacacaaggctgatggcaggctgcccctttccaagccagtgccagcaccagggggcaggaggctaaccccctcctagatctgacttgaccttccattctgccccccaggaggaccagggcccaaccctgaaaggtgggagttagaacaggaagccacaggtcccaattgccagcaccttcctgtgtcccacccagaggccactcttctggaaggagggtaagactcctcagaccagctctgtctctgtgcaccccaggctccctcctctgaaaatcaccaaggagcagaccctacgtccatctgtgactgccgtgatgcctgcctgcagagggatttgcttcttgcctaagatctggcacagcccagtggcgctgccaagccaggccactaggtggtgtcccagagctcaggccctggcagctcccagggaaagggccagagtggcttttctctcagaacccaagaatgtgccccacccccacccttggcctgattaaaagggagaagaaccacccagttgcctcaggggtcttagcacccaagacccgcagagttgtcaaatcatttaatcctaggcaggaaatctttggcacatgtgccaccaccttctagccctcatccttggcagacatcactaatccacccaggtattactgtcctacagaacacacacaacctcagaaccctttgcaacaccgcctctgtgcaagccacgaccaagtgattagaactggcatgcaagacaagccacttgccagcgctctcatttcccgtatgaggacacgcaggccaggctcactctgtctcattgggaatccaggctgcaaaagccagtggggccagaatgaggtcatatgaccctgggaggcttgtgtaaccatggttgagtcctgcggaaacctcaagtgtgtaatggcagaggctgctgggctggggcagctgcattctcggccaattgtcacctcagagcgggtggggtgcagggaaatctgcctgagcttcttggcttcagagctgaagaggccccaaaagggggtgaaaggaagggaagaggagagcaagagacagaggctctcagggtatgtgtgtgtgtgtgtgtgtgtgtgtttcaggcagccctgacagagacgccttgtcctcctgcccctgcaaaggcttgttttcttcccaagctattaatgtcgctgcagcttcaaaagccgggtgacctttaaacgctgagcctcctgctcctgcccaaggctcggaaaaggcttaatggaaactcgacccaaatggccacagctgccggggctgcaacaaagccagcctcattcccgaggcccccagagctgctgggcagccacacctgtgcccacccccaggcagccaggaagggcaaagaggaccctcgggcacagccattggagaaaagaggccactggaccttaggggaggaggaggaggagcaggggagagacagacaatgctgtcatgcgctgctgtgtgaccttgggtacttctctggaccactcatctcttctacatctgtaaaacacgagaatttggcagggcacagtggctcacgcctgtaatcccagcactttgggaggccaaggcaggtggatcacgagatcaggagttcaagaccagcctggccaaaatggtgaaacaccgtctctactaaaaatacaaaaattagccaggcatggtggtgggtgcctgtaattccagctactcgggaggctgaggcagagaattgcttgaacctgggaggtggaggttgcagtgagccaagatcgtaccactgcactccagcctgggtgacagagcaagactccgtctcaaaaacaaaacaaaaccaaaccatgaggatttgataaaaggactcctaaacctctttgccaggaagaagccccactgccacccagagaagcaggacacctggtttccatgcccacacagcagagctgccggcaggggtgaggctgggggcagcccctgccttccaaaggctactccatgagctgtgcaggctgggcatggcatgatgccttggccacccccacccctatcacttagatctgtaagggtggggcattcctttaaaaattgtttttaatctttaaaaatcagaagaaaggccaggcttggtggctcatgcctgtaatcccagcactttgggaggccgaggcgggcagatcatctgaggtcaggagtttgagaccagcctggccaacatggtaaaaccctgtctctactgaaaatacaaaaattagcccagtgtggtggcgcatgcctgtaatcccagctacttgggaggctgaggcacttgaatcacttgaaccaggaggcagaggttgcagtgagccaagatcacaccactgtactccagcctgagcaagagtgagactctgtctcaaaaaaaaatcaaaagaaaaaatacgattcaaaaaagaccttttcttttctaatttttctctctcctgcctcaacacttgtggccaagtctgtagccaatgggagatgtggggcagggacgagggcaagaggtttcagagaaggtgaatgaggtcccttgtggacaaattggtcccagagcctcagtcctaaggacatcatcattcatctctgctcctgaggcccaaatatcaggtgtggctgccacaaaaggcaccatcaagaagccaattctgccttctagtgaaaaagatccaagatgaggcttctcagcagagaaacatgtcatttgtttggttcatcttagcaagataatggtcataatagtcataatgagaatagataacacttattgcctgcttccttatatgctagccactactcaaagtgccttattgcatgttaactctcttcatcctccctacagctctacaaggtgcatattactactgctatttccacttcatagtagaaaaatgaggcgtagaagggttgagtaacttgttcaaggtcacacagctaagtggccaagctgaaatttgaacccagaaggtccgattccagatttaacactctgtatccattgggcttgatcaccattccatattccctagagcctagcacagagctgggcacacagcaagaactcaataactgtgagttaaattgaatactaaaggacagggttgcccctggagaggctgggggtgcctgggtgccactggaggtataagggatggtgcttatgtccaggaagcaaaggagaagacaaaacagtggcagtttcctcacaaaacctttttcccatcctactgaagttgtcaagttgcctgagcaaccaactgttttccaccacaacctgggctggctggggactatttccacaacagtccctcactccataaacaaaagccaccagctcagccaagatattcgactcaggtgcctgggaggagatcaaacctcagcggattaagggggctactgtccccctgcccctcccctcccaggtgccacagctctaggggaccccactgggctggcaggaacacgcgcgttcatgctaccaagtcaaagggcccacgctggaggaagggggccactggtaactcaggtgcagggccaaggaagctgggttggctccaggcatgagctcatactggaccaggcccagcttcttgggaaaaggggtcagctgctcctccctgggcttctcctataggcagtcaggctgaaggcccccccagtaggctgagttctgaggtctggacagcagcaggagacacctctgggtccccggacaggcagcaatccatgccccacaatttagcatccgaacatgcccaggtaatccgggtcaaggaacccatgattagaaaggagtgctcaggatgggcagaggagggtcctgcaaacagaactcccaacccctgcccttgccctccacactaaggcacactttgcacctacctactgattcaggaattccacttctatgaaatttacctacagatgatatgtttgcaactgtgttgagtatgggcataaggatattccttgtaatagtctaacagcagaagactggaaacactctacaagtctacccgtagcaggctgatgaaaatatgatacattatcagcatcctcctctctctatataatgctattcaataacaaacaaaaatgagggatttcaatatgtctctttagcccaagacctaagggaacaatgcaaggtacaaaacaatgagtatagtcactctactatagtgcattatggggtgtgtgtgtgtgtgtgtgtgtgtgtgtgtgtgtgtgtgtatgaaatccgaaaggattcacaagaaactgataatatatgtttcccctggggagaactgggtcataagagatagatcaaggaaatttttccactacagattcttgtatacctctaaaattttgattgatactcatttattaatttaaaaataaaatatgcaaataatccattattattggattactaagaacattaaagtaatagcattgccagtgatttttatatctttttcttctttctttttttttttttttttttttgagatggagtctctctctgtcatccaggctggagtgcagtgatgtgatctcagcttatgcaacctctgcctcccgggttcaagtgattctcctgcctcagcctccagagtagctgagactacaggtgcgtgccaccatgccaaactaattttttgtatttttagtaaagatggggtttcaccatgttggccaggctggtctcgaactcctgacctctgataatctgcctgcctaggcctcccaaagtgctgggattacaggcatgagccaccgcgcctggccatgtcttttgcatattatatcatctacagcagacataagttactatttaataataattatagcaaacgtctatgagcacttggtaggtacatgcattttctatatacttggcatgcattatctcatcaaatccccacagtacagcaatgaatacatccatttcacagaaaagaaaactaaggctcagagagattaaataacttacacagggtcacatagtcagtggcagagcccgatttggaatccaaacagtctggccccggagtccatgatcttcttaacttccaacctatagtgtctctaattaaaagtttttctagccgggcgcagtggctcacgcctgtaatcccagcactttcggaggccgaggcaggtggatcacaaggtagggagattcagaccattctggctaacacggtgaaaccccgtctctactaaaaatacaaaaaattagccgggtgtggtggcaggcacctgtagtcccagctactcgtgaggctgaggcaggagaatggtgtgaacccaggaggcggagcttgcagtgagccaagaccgtgccactgcactccagcctggtctcaatgaaaaaaaaaaaaaaaaaaagtttttctagaatgtctttactctctaattaaaacaaaattttacaaaacctgaattatggccaggcgcggtagctcacgcctgtaatcccagcactttgggaggctgaggcgggtgaatcacgaggtcaggagtttgagaccagcctggccaacatggtgaaaccccgactctactaaaaatacaaaacttagctgggcgtggtggcaggtgcctgtaatctcagcgactcaggaggctggagcaggagaatcgcttgaaaccaggatgcagaggttgcaatgagccgagattgcaccactgcactccagcctgggcgacagtgcgagactaggtctaaaaaaataaaaactgaattgtggtagaaaaaatcttaagaaagcaaaccccagagcctccagggctttaaaaccttttcaatcctaagaatcccaacccaatccttcctgctctgatcatttaggcaggctttcttcagtcactgcaccccatggtgcaccctccaaccttggtcagggactcacctgcctcctgctggggatgcagggaaggaatgagggccgagtggacaaagtgctggctcatagcatagctgtttcagaggtagaaccacagtgtggagggcctgttggggcacaacagggctgggggtctggccaggaagctgccggtggaggggagaccacaagttgtttactggtgctatgtctggggtaggaagccatggagcgagtggtcaggagtggggctttagcctgagtggtcaggagttgggcagtcctctgcttacctcctgatcctgcagcttatggggcaagcaggattgctctgagcaatctgtaatatggggatacatataccttctcagatggcgctcctgcaggggattgactgtggtgggcatgcacagcaccccacaagggaagctgtcagtcagaggcagctgttagtaagactctatgagcacgggccattcacaccccaaggccacatagttccaaggggctgattctagagtctggcccaggcgtctggcctgggaatccagccctgaagggagtgaatgtggagcacaaaggcctccccactcagggacctccaggacctcaggctgagagggctcagggaccccaagggaggagcagggagctgggccagcagccctgtgcccattcctgcccataccctgccctccagctaagcttccaagggtaggagaagtgattggaataatgcagggtgcccactcctaaccaggggaaggaggtggcttgaaggggcctgtcccccaagggaggggctccatgggctctgggcagcaggagcacaggcagagtggccctctcagaaatgccttctctggcagctgaggaatgtaggcccaggacagaggaacagaggctgggagggaggggtggctggcccagggctgagcttcaaaagagcaggcagcagctgcggctgggaggccgcccgcctcaggcagccgggacaccatcagaaattccacccagagtgagaagggcccagcccagacagcagatgggataatttagagccactcactgctgggccagctgcacccccccaaccacagactgctccctccacccggcctcagcccctgctccgcctgtgtagcagcagcgatccccttgcacagtcaggggcgcccagagcccagctgcccaggtcccctctcctgcccatccacatacccacgtgcccacacgtatactctggagctgccacggttagggaggcaggagaaacctcatgttttcacttccacatggtgcatgttgccagaggtcagagagcccagtggctgcagcactgggattcgaacccagatcgtgagactcctggccagtgctctctccttgtatgggcacatacagcagcacatgccagcacacagctcacatgcctgcatgtgctaacaggctcccactcactgccacacacaccagctcactcaaccccattcacttgcacagtgccacatgctcctcccaggccctcgcagccataggacacagacaacactttaggattttttttgaaccgtcccacacagcccaggcactcaatgtactactcccctcttcgcccaactctgaagctatgtttttaaaattacagtcactcttctatacacactcgctagtgcgcactgacagcaccctcagccctcccacagcccaccctccaagccacccccttcattaggctgatagcagggccagatgaggccctgggatccctctcttcccccatctgcacccagaatgggttttacagcattggtaaggtcaggctgacctgacttgcagcaaaactggccagaaccaggaagtggcacaccctggccaagacaccagcttcctggttccctgcaggcccagctcctagaaggcagtgcagggaaggacctcaggccagctggggctggtagcctcagccccaaatctaacaatcaggggaagggggcaagagcttttaggggtcccataaccagcttcctttcgcctcccgagggcctcaatctctacttctagaaaatggagagaaacagtccctgtttggtctgatcattgaaatcttccagggatataggtgggggctgggggagccggtcaggaccagagaaaggcaccactgttctaggcacaaaccaggatgagccctctgcagaaacagcctgctgcatcctagtcccccagggatggaagggtctgtacactttctttagctacagaaccagaacccctttcttcaaatgaaaccctcagcagaagtccattatgtaaaggcattaaacagaaacctgccctcatccacccccagcaattatgcatcatcagagaagctgccatttaccaagtgctaggcaaagtacttctcgtgcatcacatcatttaatcctcgtgacaatgtagtagtgcaggttattaccttccaccatcatcatcaccattttatagatagatacactgagtcgtgtgtgacctagaggttgtccaggactgcgccacattgaaattgcatgtacatgtcaagtctcctgacataccacttacttgcaatgcattttaaagcctgggtttaatccctcatgctctcatctttaaagctgtttgcatctctgcctgttctgctcactgctactgatgaggcttcaggaaatgcaatgagcttttccatcagtctaagaagtcaaatgttctttgcactatagcaggtgtatctcagaggacggtggcgaccaccttcctcagactcccctgaggtgtttgctaagaacccatattctctaacccactattaaatcagaatctctgagaacatgctctggggatgtgctttctaacaagctccctgggtcattctgatacacagtaaattgtgaggaccactctcttgcaaggtgatgcagttcagagacctggatgctggttttggtcccatcactaactagccaagtgacctcggacacatcattttacctactgggcctccaggtttccatccggaaaatgggagggtaggactaaataatctccaagactcttttcacctccaacattctctgtgtccactctaggttcccagctggtccacaggtatacaaactgactttcacagactgcttggtccctgtagcagccagcgcacactgtagacactcatgacataaagttcctgtctagttgatttaaggaaacctgaaaaaataccttacctctggctctaggccctaaacagatggcttttggatcatccatgccacctacccctcccctgaatatttattttcttcattccagccccagccgtgagccaaccaggactctgtaaacactgagtctgcacacctgggcttagtcaacagtcatcaaacaaaggcactgccaaatcacctcacaagcccaaacttgcacctactctgtctgtcacagggaagcagccacctgggaggtgtgaatggtgtgctccccttctcccaacacagaatgggcatgagggattgggctgtatagaggatgtagccggaacggccccagcctacaaatgggttgcaagtttaattagacttaagggatatgagaaaacagcatgagaagcagccagcagttgcaagaatcttccagaagcagctagacatttctcagtcccttggcttcttcgataatcatcattaaaatatgatgcactggccgggcatggtggctcacacctgtaatcccagcactttgggaggccgaggcaggctaatcacctgaggtcaggagttcaagatcggcctggacaacatggtgaaaccccatctctactaaaaatacaaaaattagccaggcgtggtggcaggtgcctgtaatcccagctactcaggaggctgaggcaggagaattgcttgagcccaggaggcagaggttgcagggaggcagaggttgcagggagccaagatcacgccattgcactccagcctggaagacaagagcgagactccacctcagaaaaaaaaaaacaaaaaacaaaaaacaaaaaaaaccatgatgcattcagtgcttgaacctgggaggcggaggttgcagtgacctgagatcacaccactcactccagcctgggcaacagagcgagacctccatctcaaaaagagaaacgatgatacattcaggtagtgcttgaacactgcttgctggtggcaaacatatgactgactcgtcctgcaaggtctgtgtatccctaacagcagagttgtggggattagcagacccacagcccggacacgggttgaattgagattcatgctacctttgtgtatggtgaacctgtgtgcatgtgcaaaataactaaagaggaaggatgaacaggaaaggcaaggatgaaaacccagcttccacaggggaaacatctgtgaattgtagccaggatctgctgatactagtcatttgagaatcccaagatagattatcctctcactctgaccacactgactgtccacaatgattgtgctttacgtgtgcacagcactcaacagcttaagacgttgcgggaaagtccccgaacgctttgcattcagccaggctccaggttgggcacaaaccctatagcagagagctggcccaggtgccatgccatcctcacaacaatcctatgaagtagggactgttattttgcagaggaggggattgaagtacagaggagttaaataccttgccccaagtctcgcagccaggagtaaccaggtcaggattctaccccagagcccacactccaacccctcaccatgttgtcaccccacttacaataatgaatctctgcacctctgcatgggacaaagagggaaactgagtcttccaggagggctgggcacttgaggccatcctggcaatggtcccacctccagccatcctggaggaggagcgaagccactgcgttgagtgcgtgggtgcagtgggccagccagggaacagggaggtaaaaaaccaagggggcacctcagctctgagctgggcaggccaggccccacctcatgcttcctctgccacagcagtcccaggccaggagggcaccttgccaggctccactgccacccagaacatggcctccctgtcctggtctgggttctcctcgagttgtatttccatggcagccacaatgggcagcagccagggtgagtcaggccaggcaagaggaagtggccacacttgaaaattattaacatgcagggctgagcttgagtcctttgttcttgagcaaagactgtagcatttcactttcaggaaggagctaggagggtggggcaggctcagaattgcacaaccaaagcacaggctcaaacacacacaggtcccaggtggaagtcagcttagacaggccacctgcagaaaagtgcaggccaacccacagccccatacagcaggtccacagagaaaatacaggccaactcatctccactgttttttaaatcagaggctgggcacagtatatgaaaacctatataatcccagtgctttgggtggctgagatgagaggaccacttgaggccaggagcttgagaccagcttgagcaacatagagaccctttctctacacaaaaggaaaaattagctaggcatggtggtgcacacctgtagtcccggctattcaggagggtgagatgggaggattacttgagcccaagcgttcaaggctgcagtgagctatgatggctccactgcactccagcctgggtgacagagagagagaccgtgtttcaaaaaaaaaaaaaatcagagagggtttccaacagggataaaatcagggtttttgtggtcaaaagtgttccaagtcagggagaccaagcaaaggaggcacaaggccggccacagagggaaggatgggactctgggcagccagaccccagtgggagccctgcgtctgggagagatgaaagacaccccctcaccccagctggcagggggcagccccagctctaggaagactgccttcctgcacccccttgccaaaagatggcatctctcctccaaccatgcagctgtcctggcccccctaccccaccgcgtctcctaggtgagaaaaacacccataaccatcctcacgggcacccagcaaccctgaaacactgtgtctcgggcaacttttcgagctgcagctgttccctgaaaaagtcacacatcagccaccaggagtggtgggaaaggctgaattctggagaagagggatgaaggttggggaggtgggagggagggaagggaatatggtcaccagaggaaaaaagtcaatcaacgaggaaaaatctgtttctaaaaatgtaatgcaaacaacaaaaaaacaggctttgagcaagccttataagccctggggcccaggcctgtccttagttccccgggaatggcccctgctccccgtcccatttcacaggggtcatcaagaggctaagatttcactctgctcccctcctgcacttcaggagagcttaaccttgaggccttcaaggaaattgggagaaatgggacccctgtcctttggcaattacaaagtaaatggccctaggggctaggcgtggggggatcgccctaccgtaggggagtgggggggcctcattcccacccttcctcggctctgcaggggtggctgcagcagaggtggcttgttcagggaagctacctgctccatccgtgctgggaccacaggggcaggccacccaccgggtccaactcatccccctaccaaagcagctctttttgtaaagggctttcggggacaggaagcaataaacagagtcaagcggccaagatgcaggggctgattatacagtttacggattttccaggcctttttgtactctcccaccagctgcccggggctctgcagaaaaaggtgctggagaaagaccggctggtccctggctttacaggtggccttttgccaggcctaactgggccttcctgagcgaatgagggggctgcatgcctcgagggtcctgcaagtcaccatgaagaacactgccacccggtaccactagagaccagcaggctaatggctacagcttctctctctctctctgacacacacacacacacacacacacacacacacacacacacactccagcctgctgctcaactctccacccagctctaagtcactctggtattccagaggggaggggatgcctggctgcgcgctgcctgcgtgctgaggccaggtgggtggccctccttcacaaggaagctcacagctcagctcagtttagctgcactgggggtggcaagcaacttgggaaagactgaggctggcggggaagatggctctgggctggagggcctccccagtgcgtgctcagctcacattccccaaacaggctatgatctggtgaaacacaggcccacgcgtgcaaagccgtaaatgcagagctaaaatggggaaccacccacttgtctctcaataccccatatgcaacaaaaaacacagggcacatccacatgcagccaacaccttccagtgccaaatagaatcgcatgaaaaaaaccaagtggccaggccatgtgtacaccgtaccatttttgttcaaatgtctggatgtccatgtgtacacttgggtacacacaggaagacgtctgggtggatatgcaccaaatccaaggcagcagttacctaaaaggaagggttgtgtgggggcaactcctgctctttgcttcatgtacctctgcaacctttggtgttcttacaagaaatatgccttgtttctgcagtttaaaataagatattaaacaaaataaagttcattgttggtggcaatgtaaaatggtacagccactatgaaaaagatagtgaaacacagtgaaaaaccacagtttggtggttcctcaaagttaaacacagaattaccatatgctccagtgattccattcatgggtatataacccaacaaattggaaacaggactcaaataggtaattgtacatcagtgttcatagtggtgttattcacaatagtccacagctggaaacaatccaagtgtccatcaatagataaatggataaacaaaatgtactctacatatttagaacaatggaatattactcagccacaaaaaggaatgaaatgctgacacatgctacaatgtggatgaaccttgaaaacattatactaagtgacagaagccagacatagaagtacaaatattgtataattccacttatatgaggaacctagaacaggtaaactcatagagacagaaagtagaatagaggtttccaaggactcagggaagagggagaattggggacttattacttaatgggcatagagtttctgtttgggatgataaacaagttctggaaatggatagtggtgatggtggcacaataatgtggatctactaaatgccactgaattatacgcttaaaaatggttaaaatggtaagttttatatttagtatgttttacacaagaaagagagagacaaataaggcaccagattgtagaagacaccatgagtcaggccaggtgcggtggctcatgcctgtaatcccagaaccttgggaggccaaggcgggtggatcacctgagatagggagttccgagaccagcctggccaacatagtgaaacctcgtctctactaaaaatataaaaattagtcgggcgtgatggcgggcgcctgtaatcccagctactttgaggctgaggcaggagaatcgcttgaacccaggaggtggaggttgtgatgagccgagatcatgccattgcactccagcctgggcaacaagagtgaaactctgcctcacaaaaaaaaaaaaaaaaagaagacaccatgaatcaccatcaccaggcagaagggggcactactcgggctatttagagagagggcagccagcacacaggaaatcctggcctgcacagaggggctctgtccccatctgcatggagtgggctgggagacaatgacacccctgttgacgagggctgttcagatggcctgcagagtcacgcatgccacaaggctgggggagacagcactgcagggatactttgtggacatttgaaatccttgcgttatgatacgctaggaaacagtattttaaaaggctagtgtgctggaaaacgaagcatgcatcagggaaccttggacaggaggggactggggaagagagatactggaggaagtgggcaggagaggctgggagaagaggatcagcagtctgtcctagaggaccctcagtcaggctggatcattcactccacagacgggagcatgctcccaggttcagggtagtgggaaagtgggggtaagggataagaggaccctatttacatctagtaaatacctctgtacatcttcagtacccccacaaatcttgttcaaaagtacatactgggccaggcgcagtggctcatgcctgcaatcccagaactttgggaggccaaggcaggcggatcacttgaggtcaggagttcgataccagcttggccaacatggtgaaaccctgtctctactaaaaatacaaaaattagctgggtgtggagacaagcgcttgtaatcccagctattcaggaggctgaggcaggaaaattgcttgaacccgggaggtgaagcttgcagtgagccgagatcacgccactgcactccagcctgggcaaaagagtgagactcaaaaaaaaaaaaaaaaaatactgtacctatctaaaatgagaaagaaaaagctgccagtgcaccccaccccccaattcttgcagaaggcccaaattcctgtgacttgaggccaagccataagatccagaatagggaataagataaaaactgccagggtgagctgaacaccgttgtgactggacctcgttcacacacgcatgcccacgggccagccaccaggcatcaggttctttttgagacgaaatctcgctctgtttcccaggctggagtgcagtggcatgatctcggctcactgcaatctccacctcccaggttcaagtgattcttctgtctcagcctcctgagcagctgggactacaggtgctcgccaccacacctgacaaatttttgtatttttggtagagacgaggttttgtcatgttggccaggctggtctcaaactcctgacctcaggtaatctgcctgcctaggcctcccaaagtactgggattacaggtgtgagccaccgcgcctggtcatcaggttcttcttgaaggagagaagcacagaggagcttgggcacacccaagtagggccccacatgctgagaactgtgatgccaagacaggcttcccaggggcacggtttcctgaggtttagccacatatctccaatcatgcaagggctaagagaagccttgtgtggggcacatttgtggtcagcggcagctctgcctcacttgagataacgatatttaaagagtagattttttaataaaaggatgttgtatccaggggcttcctgaaacatgccaggtattatttgtggctgtgtgtgtgcatttgtgtgtgtgcacgcattagaaagaagacaggtagctttgaaagatcataatgtgaccaggtgcagtggcttacgcctgtaatcccaggactttgggagactgaggcaggtggatcacaaggtcaggagatcgagaccatcctggctaacacagtgaaaccccgtctctactaaaaatagaaaaaatcaactgggtgtggtggcatgcacctctattcccagctactcgagaggctgaggcaggagaatcgcttgaacccaggaggcagaggttgcagtgagccaagatcgcgctactgcactccagcctgggtgacagaacgagactgtctcaaaaaaaaaaggaagatcataatgtagccactatggctgtctcagagacctacttcttctagaacctactgtccaataaggtagccactggtcatgtatgacaataaaaattttaattttaattaaaattaaataaaatgtatttatttgttaattttttttgagacgaaatctcgttctgtcatggcgagacggggtttcaccacgttggccaggctggtctcgaactcctgacctcaatctgcccgcctcagcctcccaaagtgctgggattacaggcatgagccaccgcacctagcctaaaattaaataaaatttaaaatgcagttctttggtcataccatcacatttcaagtgttcatcagccattatggttaatggccatcatattgaacaggacgtattttagaacataagccctgattcactataactggaagagctttattatgactttctgagggagaccaaggactatggatggtcaatccccagcagaggagcccttccacatctcctgggcaaacagagctggggtgagctctgtgtcctctcatcactgagtcctcagcctcatccaagatcaaagcgttggctgtttcctgtgaaacttcacacccaggcagagagaagctggggtccagctgggagcctaaattctgatgtccacactggcagggcccaggcctcagaggaccaggctcagaaaggctttcccagtttgtctcaccaggaggaaggatgtcttaacatccccaggctcctcccctgttccctgtcctgagtgtgcaaatgcaaaactgcctccttgggcttctccagagcaatggggaggagtcagagaaaaagggcagctgaggcggggtatgcatgtgtgtgcgggtagacagcaggtaagtgcatatcaaagagaacccaacggtcaggctgaggaaataaccgaaagaggttctagcaacacaatgactgggtgtttggttctggttttgttttgttttgttttgttttagagatggggtctctctcttctgttgcccaggctggagtgcagttgcaggaccatagctcactgcagcctcaaactcctgggctcaagcaatcctcctgcctcagcctcttgagtagctgggatcacaggcacacgccaccatggctggctccctccatccctttcttttccttacaatttctgtgttgaagaacacaggccattcaatggcagccttctccacagactggagttcatggagtaagtttttttttcttgctaaacctcagtgacctcccctgctcagcccatggggcccctgtgacaataaaaagaaaaagtacacctgaaagcacatagggaaatgcttacgatagtttaagcaaagaatacaagatgcaaatgagcacagaatacaaattaacatatatatgttatgttttcaaccacagaaaaaaaaatgcatagaaaaaaggatcaaaaatatatatgcctagggcggggcacagtggttcacacctgtaatcccagcactttgggaggccggggcaggaggatcgcttgagcccaggtgtctgagaccaccctgggcaacatggtgagatcctgtctcttaaaaaaagaaaagaaaggaaagaaaaagaaaagggaaagggaaagaaaggaaaggaaaaaagagaagaaaagaaaaaagaaaagaaatatgccaaatatatcaataactgtcctggatggtacaactctgtgaacaccccctttttcttcctttcttatatttttccacaattagcatatcataatgtgatcatgaggtgacaagtcttctttaaaacatttcaaagaagagtgcccttaaagtctggcatgagacccagtgtgtcaccaggccttcacagtaccccctggctttgctctgttaccatggccaccaccaatccagctgagaccctcagcctcccaagcccgcttccctgatgccttcaagctcctcttgccgtctccctcccattttctccctatgccaccaacggaagagcaggccaggtcccctccgaactcctcagtctcttatgtaaagatcacatccctccctctgcatcagcggtcctcatgctcagcaagcatcactgtcacctggagggctggttaaacacacattgctggcctccacccccagagttcctgattccctgggtctggggtgaggtccaagaatctgctatctaacaagttgttaggcgatgctggcaccactggtccagggaccacacctgtctccctaactaagccctgtccatccttcaagacctcgctcaagttcccctgtcccatgaggcaatctctgagaacttcagccaatattgatctctctcttcccttccagagcacctgttcctcttaagggtggtttggtagatggggagatcacttagcggccataatcaggggcagtgtagcacttcatcacctgctgtcttgtgtggctggctctccttcatcctaccagctctcttttttcttttttcttttctttttttgagatggggtcttgctctgtcacccaggctggagtgcagtggtgcaatctcagctcactgcaatctccgcctcccaggttcaagcaattcttctgcctcaacctcccgagtagctgggattacaggcgtgcgccaccacacctggctaatttttgtattttcagtagagatgggatttcaccatgttggccaggcctgactcaagtgatctcctgatctcaagtgatccgccctcttctgcctcccaaactgctgggattacaggcatgagccaccgtgcccgtccctatcagctcttaagggcagactgggacagacatttcttaagtgattcctcattaaccaggaggcattcctcatgtcccaggtgaactgaatctgtttcattctcaggcaccccagtgacattcacaaacagacttctaattattcactcgctcattcactggcagtcaaaaaacacttactgagcacctactgtatgtcaggatgcgcaagataaaaacctcttttcttcacagaggccaagaattacaacagcatgaatggcagaagcctacagaaggtgctctgtgaggatccctcccaaccgcagcccaacgcccccacccctggccctggagaccgctacacacacacaaccttggccccagttgcaggtgctggtgcctgccaacaagcacacacagttgcagtcacaccctcgtgtaaccatggtgaggatttggctgccggtcataggctccattgttccccagctaagccaccctggactcggggacaggatttatgggcagacattgttaggagaacagatgttcgggcaggcaggcctgggacccgctggagggagtcaagaagacactacctcctaattaataggcggtaaatgtctgaggaacagactcctgtcccatttcttcaaacatctggggttccggacacttaggccctctgccaggtgagacatttggagcaggctgaagagatcatagattctggaaggtagatgttggtttctctgtgatcttggacaactttttacttgtttgtgcctcagtttcactatctactaatatttactacttaaaaaaaatagtaaagccaaaaaaaaagatgataaagacaccgtttggaagaataaagggagagtaaaaaacaaacaataataacgccactgtgtaaaaataaactgcaaaaagaccactcagggaagctccatcaatgccttggcaggaaaattctaaacgtatacaggcctacctggcacactgattctcaactagaggggtgcatcagaatctccggggagcctttttctttctttcttttttcagagacagggtctcactctgtcacctaggctgtatgtagtgcagtggtgcggtcatagctcatcgtagcctcaacctcctgggctcaaaagcgatcctcccacctcagcctccagagtagctaggcctacaggctcataccaggaccagctgcttacattaaaacaaatttttgtagaaactgggtgtctccgggcacagtggctcacacctgtaatcccagcactttgggaggccgaggcgggtggattacctgaggtcaggggttcaagaccagcctggccaacatggtaaaaccccgcctctactaaaaatacaaaaaaattagctgggcgtggtggcaggtgcctgtaatcccaactacttgggaggctgaggcaggagaatcgcttgaatcccagaggcggaggttgcagtgagccaagatcacgccattgcactccagcctgggcaacaagaacaagactccatctcaaaaaaaaaaaaaggaaaagaaactggtctcactatgttgcccagacttatctccatctcctgggttcaagcactcctgcctcagcctcccaaagtgctaggattacaggcatgaaccactgtgccagcctctggggtgctttttaaagaaaaaggcccatgtgtctttgtcaattctactgaatcagaatttcctgaggtgcacccaaaccccatccccaagatcccaagtaagtcaaagaggagtgcagggaggagcagaggctgcaggggctgtaaagcagggacagggcccagggactctagggaggagaggtcaacattgagcaacccctcatttctgccccccatcccagggatttctagcgaggaaatatcatccttctcgtctgaactgaccagtcctccagggacctgctgattcacacaatgcatggctgtgtcctgggccactcctccttctggccaccactggccagcaccccaccccagcatactttcctgaccctgggttctaactccttggccccagaagcctcaccctggccaactgcaactctttatttcaaggattcaggttgtagatctcctcctccagaaagtcttctcacatgcacttcttggctcactcccacgtggctttggcctattgaaccctctctctcctccaccatcaatgtggcagcactagtcacatgttctcacgattgccactgtgcccgttggtggccccaacagatggtgcccacctggaaggcgggattttttggatctcattcagttctcggtccctaacaacctgctcagtgcccagcatagagcaggcaaggaatatgtctatttatgttgatcagaagaaagggagaggaggagattttaaatcaaacagttatcctaggcacatttttcaaaactgtaggaaaactatagcaaatacttgtattagcatgtcctgtgtgccagagagagaagcctgagacacagggggtaaataagtccacagggtatctctgcttcaaagagaaaaagagttaaaccttggggggtcgggaggagctacctctgaagtccttgctccctgtgccttagaggtcacagtgactccataacttcaccctttggataaagcacaggttcaggttgctgtgcacagggaggagcaatatatctcggcaggaggtctctctcaatgaggtaccagggatcctgttgcatccatttgggagggtctgggagtcagcagtcccaactgggagctcctggagctcgatttagaaaagggacagggataatgctatctggggccttggcatgaaagggcttttctttcccatgtccagactcccaggggagagagaagggttccaagtctcctagcctgatggtttgagagaaacagagggatgtggcctgcacctgccccacctggcctctctgggtccaggatcaggccagggaggaggaggcccactaatcctgggtgcattactcaagagagactgtgaagaaaagcaggaactctgagtggcattaaagtaggcaggaaataaaatttattcagagtcagctagtgtaattgaaaatgaaccatatgccaggcacttggcaaggtgcgtccccacagtcttgatttaattttcacaccaacccaatgaggcagctactattctccttgttttaccaacaggaaactcaggcattgttctgctggaaggagagaaggccaggaggcaaccctcaaaacctgggtgtgtttggccaaggccaagtagagatttaagggtcttcgagtaaagcattcaggattcttactcttcatttgctatctttcttaaagacagaataaaataaaatgggatttaggttggattccaaaaaaaacttcctgactataaagaggtattagaaagttcatttcctaggacagatccctgaaagatgcaaccacatcaaatgcccactctgcaggcaggagactggacaatttgacatttaccaccacaggcacgctcagaggtcccctcaggcaactgggctctagctcccatctcaagtgaggcttgtggacaatgcaaaatctaaagtcaaacacatcctttgctaaatttaacaagcagataggcatagcgttcagatattaaaatgaagtctttttttaatgaatgggcagggcttggagtttgccaatgtcatcaatgaggttaatgtggctacgttaaagttagcacatgagttttggatgatgcagtttatcaaaccagcagggactgagcaacagctcaggcagaaagttggcgcctggccttagggagccctgtccggcctgggtatccttgcccacgtgccacagctaaaatgctggtaggacctcggggacttaaggcagggttgctgctacccccggctgtttgggccaacacttgagctccggcctggaacagaaggctccctaataggttgttaagagcctgggaaggcggaacaagctgggcggggaggagggggcctcagggggctgttatgataagcaagagctcagtctaaagacatgctcccaagctgaaggtttcatttcctgccaggcaactcacccgtttgaatcaaacacagaatttagtattcaccatagaacaatcatatgacaaaaactttgcagagtttacccagatgtaggttttccttaaggtaaaagaggagtcatattaccgaagcctcatcttctcacgagttcaaaacctctccaacctctcaggagaaaccaagggccggaaaggttaaaggcctcaccctcaaggtcccaccaaagaatcgaagctggtgccagctctccgactcctacccagcaacccgccccaggtggccagcagctgcctctgagaatgcagaaggccgaggggggctgagagtgtttctaaatcacagcacacttgctccatcccgatggccttgtgatgcctgaggcatgagggcaggccaggacaggagccatgcagcggggtctcccaccccaggccctccaggcccccaaaaggcttcctgtcaggccctgcactgccccctcctcccactttgatcccagagaggggagggggtggagagtccagagaagtccccacttggcatcgatttgcccaaagcaaaggcaacacaaaggctgcacctgtttccatggagatgcgacggggaagcaaaggaacaaaacagggagaaacacaaacccgtcaccacctcccaggccagtgtgatcgatgctggcagaccagagccctgacaggaagacagcggaaggatgaaaggtaatcagtggatctagaagccacactgggagccctttcaggccacagagaggaggccagcagcctcgcccacccccaggctcacaaactcgcctgggccccgctctcgagaaccagtccaagcaaaaactcccagacggaaatccacagtgagcacttactttacaaaaggattccttgcttgactaagggattccttcaagcagcaaaatcccacctggagtgcactgtctgttttatttcattattcacttctctgagcaggaggaggagggggtcaagggagtaacttccaggggaaagtttgtgagaagagatgaggggatggaggggtggggactggactctgttcataaaacatctcctaggagaggcccacaagaaaatggagacgtggtgactttagaagagaaaggtgagcaggctaagcgcctgaggcccatccaatagggaggacatgggaacctgaacagtggagaagaatgggcggcaacaggtgtcccactaggtccctgaggttgccacaggtcccatcagggcacacaggtgctctcaaaaccactgggctatggggaaatgtgggggcagcctcatctcccccagggcaacaaggccagtggcttgatgcctccccgggtgaatgttggaggaagatgacaacaagaggcccagcagatggcagcggctcagaggctgtcataagggcctcttgactggcactcattgttcatcaggtgacacatactaagtgccacttagcacatgtggtcatcctgggacgaaggggcaaggccatgcaccaacacaatcctgcccttggagagtctcaaccaggccttcactccacggagtctcttcctgactataattcttacagggaacaaaaaccaaggataacaataatacttactgagcatgccatgtgggcctgacactaacacttgtctcattgatcctctcaaccatcccatgagagagaggcctttcttctccccattgactgatgtggagacaggcacagagaggtaaataactcacccaaggtcacacagcgagtaagtggcaaagctaggattcaaaaataggtctgcccaacttcagagcctgtgaacagcaggctcaacacctgccacatcagcctcatttaacaggcagagacactgaggctgagagaatgcaggtgacgtgcactgaggcaggggcagaggctgaactctgaagactactcctcctgacccaccccaaggcttttttgccttgtgatgcctccactaggaatgccagctggcttttttggtggggtacatggactgctctgtgtagtcactctcctgttctggacctcagtttaccccctcaacaaggtggcatcgttagagtgtgagcccctgctgtctcactgagaggagctgagaagaaacatggggcgtgcattcaaggtgttaccagggagctggtgggagaagcagtctcagtctcaaagatccacaagctctgtaatgtccacagagcaaaatcctaggtaggatatccaggctgctactcaacagtcttcccaccagagtacatgtgcaaaaccctcagggaacctggggacttcccagaagtattcagacatggatggcttccagggaatcaacttctgaaagctccacttcctgtgcttcttcctaaaactgatcagccgggaaccctctgggtctgccagttctcccctcaccaaggccctcctaaacacttcccaaaagaaaggcctacccccagtcatcccaacctcaccctggtatcccgccctgggttataaaagccaccaaagagacaacggaagaatgcagccctcatgggaggagttccagcaggacaaagaacttccttaagatgttgagaagggggccttatctatcttacctacccatctgtttattttaggattagaattaggaagctgacacagggacacctgtttaacctgtttaataaatatttgaattaaaaagaggagtcagagtttttccgacacaaagtatgatttggctggctggtctaaccacaagatccagcctggccaattaggaattatggtggatgttttccacaactgcctgggctgggtttgctgttctaaggctttgacaaaaataaatttgaagcaagtagatggcatacaataggcctggaaatacattccacttaaagttatgataaaacattttatatgtcaatttttatttttatttttatttttctgagatggagtctcactctgtcacccaggctggagtgcagtggcatgatcttggctcagtgcagcctccacctcccgggatgaagcgatgcttctgcctcagcctccccagtagctgggattacaggcgcctgccaccacgcccagctaatttttgtattatagtagagacagggtttctccatgtgggccaggctggtctcgaactcctgactccaagtgatcctcctgccctggcctcccaaactgctgagattacaggtgtgagcccctgcacccgggaatatatgtcaatttttatgttttcttaattaatttttcttttgtgagacggagttctgctcttgtcatccaggctggagtacaatggcgcgatctcggctcactgcaacctccgcctcccgggttcgagcaattctcctgcctcagcctcccaagtagctgggattacaggcaggcaccaccatgcctggctaatttttgtatttttagtagagacagggattcaccaagttggccaagctggtcttgaactcctgacttcaagtgatcttccctccctggcctcccaaagtgctgggattacaggcgtgtgcccggcgatatatgtcaattttttaatatatgaggggatacacagttgttcaaaattcttttgaggtgtacaagtgaaagaagtttgaagcctgttgctttccttccctggagccatgatcaaaggcttaagctcccacaccgacaaacccactaagccatgcacatagtaagttttcaagacaaggcagctgcaatgtatacaacaagcactagacctgaaacctgggtgtaactttatttctgctacttcttagctgtgtggctcagaaggttaagccacccagcctccttgagcctcagtttctccctaagtacatggagataataccatacaagatatattcaaaatcctgatgacgaggaggacattaaatgaacaaggtaaaagtgcctcagcacaaacagcccccagtaatagccaaccagcaagcgttttctgtttggcttggacaaattgatggtatttgtctctagacaatattaataactaacatttatcgagcgctcactatgtgccaggcactggactaagtgcttcacaggccccggctcattttgttttcacaacaacgctgcaggaaagatgccattcttattcctgatccacaggcatggaaagcttaaagacttgctcaactcactcagctagcaattaagggcccagtaggtctttttgattccagtgactgtgctctaaaaaccctccctactcaaagtgcagcctgagaccagcagcatcaacagagactggtaccttattagcaacgcaggatcccaggagctactccaaacaaactgaatcagtatctgcattttagcaaaatctatgagggattcatatgcacatccaagtttgagaatcactgctttaaacctctagtctggctaattttaccatcctggttttatcttgctgaaggtaatattactatgtttgctttctccatgcacacacacacacacagctgtcaattaaagcaagcaagatggttagggattataataatccatcagcaacacatgcaaaatgcatttttagaaaagggctaggaggatccacatcaaactgtcatcagtggtcacctctgagaaatgggatgggattggggggttgttaggaggagccaaagaaggctttttattatctgaattttctttttcttttctttttttttttttttttgagatggagtcttgctctgttgcccaggctggagtgtagtggtgcaatctcggctcactgcaaactccacctcctgggtttgagtgattctcctgccttagcctcccttagtagctgggactataggctcccaccaccaccatgccgagtaaatttttgtatttttattagagaacagggtttcgccatgttggccaggccagtcttgaactcctgacctcaggtgatctgcccgcttcatcctcccaaagtgttgggattacaggtgtgagccaccatgcccagctgaaatgtttaataaacagagtatagttgtatataggttatacaatttaaaaggaaagtatgttttaaaacacatgtacagatcactgggaattagttgtactttatgagctccgtctatccaaggttattgtcagctatccagcctctgactgtggaaagccaaggtagcgagttaatagggagatattggtggaacaaaaggagtgctgtgcttggagctggaagacaacagtccagactctgcccctgatttgctgtgcgatcttgaggctctcctccacgggcctgtgtttcctctgctataaaatggggggaacccccttcccctctcagggaccaacaatgcagtgaaaggcataaaagttccttgtgaactgcaaggtgcttggcaatgcaacggccgagtgttttcttgaaaagaaaagagatgaaaaaaaaaagcagtgaaacattcaccctcactcattccattccccaaacacagatatcccatgactttataaggaagatatacggagtaacctggatttagattccgtgggagcctcaggctgattttcaaatccttattcgaacttagaagttaggcttggacgtggttcaaaacatgaaaagaaagggctatttctcaatgtctggcccatttgctttgtgcttctctcccggtttctctgcaggctcacgagggctggggagcttctgtcccagggttctgtgtgcttcctgtctgggcgcagtggctgccctctcctttgctttcatggctttctaccagcacctgtctccagtgctacctctcagctgctcttagagcaaaagacctggggtctgtggttcggctcaattctcaccactgcctctgttttccactttgtatcttagaagtcagatttggtcaggcgcagtggctcacacctataatcccagcactttaggaggccaagatgggcgtatcacttgaggttaggagttcaaaaccagcctggccaacatggtgaaaccctgtctctactaaagatacaaaaattagccaggcatggtggcacgtgcctgtagttccagctattcaggaggctgagacaggagaatcacttgaacccaggaggtggaggttgcagtgagccaagatcacgccactgcactccagcctgggcaatagagacagactctgtctcaaaaaaacaaaaagagatcagatctgcagaaaaagcagcaaatgttacccctggctcatctggagggtgtggagtttggatatggagggataaagtgacttgctcaaactcatatagccggcttaaaacaaacacagttgggtggggttctctggcccaaaagtccaggcttctttaccctgtttcctctatgacctttggaaataacctcctttcctcaagacttgtccaccactcatttgcaacttgtctgtcactgacctcccccctctgttcattctaggagacatgaatctggggattaaaagtttctgtgcttttcttcaaacagaacaatcctaaaaccacatactctgaaagtatcattgaaactgaccgagaagagaatcctcagccagattttccatggagaaccagacctgtctaaaccagtatgagctttcattacagtaaagtaatggcaaaagaagcctcggggcagacaattccagattcactatttaagtggccttaggtgactggattcacctctctgagcctccatttttctcatatgaaagacaggaagagtgctaccacctttcagtttaaaaggaagattacaaataaggataaagctcttcctacatagcaggagctcaataaacagcaactattaccatcatgatcgctgtcattccagaccatccatcccaaagacaggggtctaaatcagttctgcaatccagctgcacattagaatcacccagggaatttctccctctctctttttttttttttttaaatagggtcttgctctgttgcccaggctgcagtacagtggcatgaacatggctcactgcagccttgacctccagggctcaagcgattttcccacctcattttttgattttttatagagacgggccttgccacattgcccaggctggtctcaagctcctgagctcaagcaatccatccacctcggcctcccaaagtgctaggattacaggcatgagcctctgcatctggctgtgaattttattttttgtttacaatttccaactagctcccaggtgatgccaatgccactggtccatggcacccaaaactcaaggtgttgggcagatggctggaaaggttacatgaatctctgtccagccaggctagagtgcactgcctcctggaagcagacagtcaactatatgacctcagattagggcatgaagactcagaaccaaagcttgtcctcaggtgactctctctctctttggcttcctgttggctttttgggttctaccaagagctgcagacaagtgtggccacaaagatgcactagcaaattaaccatggtgccacaccctgctttcacgtagagctgccgtctcaagatcatccaagggagagtcagaaggcaagggccctggtcactttcactcagataagcagggtataggacagcatggcctgccttggctggatgtcccagccagaaggagctgaaacaatggcaactctggtcaaccagacttctctgatcagccaaccaggaaagcttcccaccaggagctggcaaagtaaaggcacagttgatgggctcctgtgaaacgagagctggtggggcgctgggtggcaggcccttctggctttgaggttggtgcattttgtgaccctgaacatcaacaaaacaatactgactggacacctactatgtgccaggcaatgttacataaatattttcatttgaacatcacatcaactttgcaaggcgggcatcatcatctttattgtacacatgaggaaacaggctcgatggataagtaacaatggaacttacacaggacagagccagaaatgtaactaaagcctgtccaatacttcctacttctacttttttttttgagatgaggtcttgttatattgcccaggctgggctcctgggctcaatcaatcctcctgcctcagcctcccaagtatctggttctacaggcacacaccactgtgctccgattcttcctgcattttttttttttgagacagcgtctcactctgttgccaggctggagtgcagtggcacgatctcagctcactgcaacctccgcctcccaggttcaagcgatttttatgcctcagcctcccaagtagctgggactacgggcggacgccaccatgcccagctaatttttgtatttttagtagagacagggtttcaccatgttggccaggatggtcttgatctcttgacctcgtgatctgcccgcctcggcctcccaaagtgctgggattataggcgtgagccaccgcgccgggcctcttccggcttctttacgttgctgctcaaaactcttaatctctgcgactcattttaccctttcatttggggcagagaagaaagggaaaagtgtgtaaatcaatagaactggaagtggtgtctatcccgtgtgttgcgtggctaagcaaggcacccagccccaggcccagggaatgagactctatcgatgcactgatgggcaccgagagccaatctgagcctgggtcccatcaccccacccctgtataagccacaggaagcttcctgaagctgtcaaagggcgctcaaatgagtgtcccacttctatggagccaagggctgaagaggccatgctagaagccgctgtcccatcaaggccccaggcctgtaccacagccaggtccctcctgctagcagtttggcaagaagggtccttggcagaggccccaactctggattaatattacaccaagagaacccaaacaaatggctcctgactttcacgctccataaagttctgaggcttaaaataaagatgagtttggaggggagggggtgtcaacaatagtcagcatagcagagccacaggatgaaacactgtacagccacttaaaagagtgtttaaaaccacaccgttccattaaaaattctcattatgtagtgttacaccaaaaagctagattcaaaggtatgtaaatcagtaagatcacaactagtttttaaaacttgtgcacattaaaaaaaaaaaaaagaacagagggaaatataaccaaatgttttcagccgtagtactgaaattatcagaatgatcaattttactggaaattaaacattttccagtttttctttaacgagcatgtaaactacccagggggcaaggggaacacattctgactaaaatccgtgtgactgagaagtcaggatgaagagctgctgggatggaataaacccctccaggcagccccgagcaatgagatgggacaggcacagctgtaatctagaggccctcgggctctgctgtggtcacacctaaacaagcaagccagtgcggtacccttcccaaggggcagaagttctccagggaacataaccaaaagcccattagcccttagagtgctctaaagaagtttggcaaagacactgcagtgaaacacagcctgctcaggtgctctgccccaggcaaagagacagaagacagctgccgctgcagggtccagtgtccctgagagacccccagcagacgaagatccctgccagtgccgccacccccaagcatgaggatataaaagagataagcttcaccatctggggcacaggagcctcctgggaatgcctgcctgaatgagggagaatggcaggtccctaagccatgtgcaaatgtgaaggaggaagagggtcaaaagagaaggagccacagcagctgtctctaaaagaacactaattacagggccgtcctcccttacccaggcctggtactgccagcaaagatgctctcgagctcagcgttcacctgaccgcctgtcctctgccacctgtggttggcccagaggtggcaagggtggtctggctggggctgcaggcctgatggctccccaagctgggtggggaggccccaagcccagcttactgggaagtcctcatcctagggtcaggggccctgtgccaggagaccctggaacatggggataactagagaacttccttctctggaaatgttagagacccaccaatactggaatggaaaaagtgacgtattcatccctcaaagttgcgagaggggcagagtcaagtgcagaggtgagaaatgccagttctccaggggtccctcacctgccactcatagcaaggagctcaagttcaccatcaccaaaggtgcctctgcatggcctcctgctgctggcattttgctgagacactggagaggaccgaaaaaggcccacaccaagccaaaaaggtgggcaggaggaaagagcattggcctagcagtcagactagccggatcttgtccccattcaagccccttcaccccctgaaataggtgtgattcccatcctagatactacatcaaaacatttacagatcggtgagaaatgtatgggatgggacttctaaaaacaaccaaattctggccgggtgcagtggctcacacctgtgtaatgccagcaatttgggaggctgaggtgagtggatcacttgaggccaagagttcaagaccagcctggacaacatagcaagaccctgtctctatttacaaattttaaaataaaaaataaatttaaagctgtcaaattctaaacaaatggaaagtgtggttaagatgcacgggaagtcattataaagtgaaggcattttgcttctctttcaggacaatatgcaaattagaggcaaaaatataaccacatcgtttttcttttcaaaccactcatgtatccaccataaaacagagttatggggctgcttctggaacataggaaatggggctcagcggctggtgccacaccgggcctcttggaccaaagcgggaaaggaatgactcagacagggaaaggaagagacaaaaccaatgaaacaggaggaaacgtagggaggttggaacccagcatctctgagaaagaggcccagatgaaagggaggcgcagctgggggaaacaggccggcaattgtttgtagggatggccggccctgctgctttgtgtgttaatgtaattaagggctcagtgggggccaatgtttagaatcctttaactccctgccattctcaccgagcggctgggacagagagtggggctgttatggagggtgccaatgggtttctgggcagctcacttaaaagggcatccaggggcaggcgggcctgggcagcaggaggtgaagccctcattccagggtgcctgagaggcacttcctcctcctccccactccccccgggagtctccagaagccctgccattgccctgaccccagttaacactcctggtaattgctggggctgctgcagaaagcctagggagaaagaaaaaaaaaaaaaagccagagttagagagagaaaaaaaagtctgcttctccagtgttcattgaggcttccctcctgcccacaccctctgggttggggcatccagtttcaaggaagctcccaaggcagggctctccatgcctgaagccaaaatcaacaacagcacatggaaattactgaataggagcagctgggtttagcaggcttctaggagccctgctccaaagctcccaacccctcaaatttccaagaggtatgtcaggggatctgccccccaaccccactcatccaaagaaagcctcacattaacccacagcccaataacctgttgctctgcaacaaagacagtgcaagttcttgctaccaacatgagattcctctggatggcaatggacattctgtaggcaaaacaattcatgcaatgtaagctttaaaaatattatcccatctaacttcacaactaccctgtaaggtcggtactgttctttcctccactttatagatggggaaactgaggcttagagagactaaatagctgtacccaaggttaacaagcccacaagtagcagaggaaggattcaaaccctggcaccctgactccaaagcctgtgtatttaacccctagtctatgccacagggcactcaggtagtcactgggcagtggaaacacgccttgtgaagcttacagcctggcacaaggttcttagcgaaggctctgtgagatttctgtgaggtctatggaacccctcgtcccaaaaatcgaatgcaatttaatgtgtttgtgtgtgcctatgctttttgggaggggtgtcaaagttctctttagattatccacaggatctgggaccggaaaaaagcttaagaacctagggccgatgggcgtggtggctcacgcctataatcccagcactttgggaggccgaggtgggcggatcaccaggtcaggagatcgagaccatcctggctaacacggtgaaaccccatctctactaaaaatacaaaaaattagccaggcgtggtggcgggtgcctgtagtcccagctactcgggaggctgaggcaggagaatggcgtgaacccagaaggtggcgcttacagtgagctgagatcgccactgcactccagcctgggcgacagagtgagactctgtctcaaaaaaaaaaaaaaaaaagaacctagggctaataaggtaacaaccctccgatgccttgtgaagtacattctagaacacagatcttccgatttgagtcctctacgttttcacgcaacctctttgctatcaagaaatagcgaagagggcaacttgagtttctccagaaagggagaatatactggcattcgagaattagaggtacctggcactgaaagtccacccagcctgcctgggagacagtatccaggatataaactcggggtggggggcgggagggaaagggttaagagtcaggtcctgtgggattaaaggatttcctactctgtgtttattacttctttccatcacttaaaaacaagttccaacattgtcccaattctgatcctgggttttacttggatccacactgagaaaaataattcattacggcagccccaaactatcagaaattagcaggcggggaaaaaaagtttccattccatactaatttgccacagttttaaaggccaccgtctgtctaaaaacaagggtgttccttaactgaggccattgtcctcatttccagatgctccaagacagcaaacaatgacaatgatgctgctgccaacatttgacacccaatattatcaagcccaaattctgtgtgctgggctcttaacgataagctttacccaaacttatctcatttaatcctcacccctgccctatgaggcaggggcattatcatctccaatttagagatgacaaaattaagccccagagaggttaaacagccgcccaagaacacaccgcaagtcagtgacagtgccaggattcaaacctggatctatctgaccccaaagacagggctctagaccagggccactaaaagtatgtccacagaccacctacaaactgttagttgtgggtccttaccaaataagtagagaaaaagaaaggaaggaaggattttaaaatgtttctagcaatctgaccttagcacaatatccaagcatgtgatctgtggacttccctcttagaacagggtatagaccagtctggatgttctcagactggctcagactggtcatgctcatcggttcctgaactaaggaatagagcatattgtccttcacctcagatactttgagaagcactgttttaaagcactgcaaagacgggtcatacaagacactcaaacaaggttcagcacgtccccagctgtccctgcagcatccaaagtcttctagcacagcgcttctcagtctgtctctctctctctttttcttttttgagacggagtttcgctcttgttgcccaggctggagtgcagtggcgcgatcttggctcactgcaacctccgcctcccaggttcaagcaattctcctgcctcagcctcccgagtagctgggattacaggcaggcaccaccacgcccagcaaattttttttgtatttagtagagacagggtttcaccatgtttgtcgggctggtatcgaactcctgccctcaggtgatccacccgcctcggcctcccaaagtgctgggattacaggcgtgagccactgcgcccggccacttctcagactttaatgtgcacacgaaccactggggaccttgttaaaatgtagatagattcaggaagttcaaggtggggcccgtgattctccatttctaaccaggtgatgtcagcgctgctggtctagggacctgactttgggtagcaagtctccaactgcacaagcagaccagagccaacgaggctgatgctgtgaactccacctggcaaacaagtcggactccagcaaaggctcaccagttagcactggctgtgaggaggccagaaggtagcccttacaaacacctttccccaactccaggctgagtctgggatgcccaggggcccttttatcctgagtcagaaaccaaagccctctccgtcccaggggtttaacagaaggcagagaaaagcagctcagaagcacttgcaaacattgcgaggaacgctacccacaaccacagcaagaggagggaggattttgagaaaactgtgcccacttctttggttctgctcaagccagactgaagctgggtctccaacagtgatggcctgggagaatcactacacacgtgtgtttggacagcactttctacttcttaaaaagaagatatccacatctatcgtgaaagctgagaaatctaagagctggaagcctgggaggaagggatgtgctgtggccaacacaggagggcagaaatgacccctctgtgaccgctcctgtagccagaaagagccacaaacagtccaactccaaaggggaaatggtccccatttcctgcaggtaaccttctcatgacctgctctactccctggaaattcttgacactaaaggacactaaagaccttcttccttagtgccaacctcagtctctcctagttccatttctggcacaaggactgaatgacttattaaaggagctggccgggtgtggtggctcctgtctgtaatcccagcacttaaggaagctgagacaggcagattactcgagctcaggagttcgagaccagtctgggcaacatggcaaaacagggtctctacaaaaaatacaaaaattagctggaggtggtggcacacacctataatctcagttacttgggggctgaagtgtgggatcatctgagcctgggaagtcgaggctgcagtgagctgtgttcacactccagcctgggtgactaagtgacatcctgtctcaaaaaaaagaaagaaagaaaaaagaaacaaacaaaaaaagagggagaggtacaattcgcaggaaaaaccccagatctcccattcattccgggcagtcgctcattcattcaaaaacactgatgaagccactgccacatgccgggcactgtcaggaagtgggcatagaggcacaggctggggccttctccttaccctcctctaaagaagtggggaataagcaaaaaaggggtcatgagggcattaactaagtcaaagggcactgctgttcctgcagtggggggaaagagagttcctgggcagaagctctcacatatgcatggactcagggaaagccagtccgagggtgagactgggtattcaagttgatggtggctgacagatctccttctctttactcacacagggccaagaaaggcctgagggttaggaacacacaaaggaacacagtcagagggacttcatgtcccaaccaaaggtgtctcaataagacacagtcccgaatccagggaggatccggctgaaaagcctcctctggattgcagaggactcccgtgaaaccacgagcctctttctcctttgcaaaaatcaaatcgtattctcccacctccaaaccctgccatgtgctgcttccctacacgatgcccccaccctgctcctctcacccacatgtgtccttccctctctcagaattctgcttaaaacgcatctctaggctgggagtggtagctcatgcctgtaatcccagcactttggcaggctgaggcaggcacatcgcctgaggttaggagttcgaaaccagcctggccaacacggtgaaatcccgtctccactaaaaacacacacacacacacaaaatagctgggtgtcgtggtacatgcctgtaatcccagctactcggaaggctgaggcacaagaatctcttgaacccgggaggtggaggttgcagtgagccgagatcgcgcgacagcactccagcctgggcaacaaagtgacactgtgtctcaaaaaaaaaaaaaaaaaaaaaaggccaggcatggtggctcacgcctgtaatcccagcacttcaggaggccgagatgggcaaatcacgaggtcaggagatcgagaccatcctggctaacatggtgaaaccccatctccactaaaaatacaaaaaaattagccgggcatggcagcgggtgctgtagtcccagttactcgggaggccgaggcaggagaatgttgtgaacccaggaggcagagcttgcagtgagcagagatcacgccactgcactccagcctgggtgacagagcaagactctgtctcaaaaaaaaaaaaaaaaaaaaaaaaaaaagtctgttggagggccaaggtggttggatcatttgaggtcaggagttccagatcagcctggccaacatggtgaaaccccatctctactaaaaatacaaaaattagctgcgcgtggtggcaggctcctgtaatcccagctacttgggaggctgaggcaggagaattgcttgaacccaggaggcagaggttgcagtgagccgagattgtgccactgcactctggcctgggcaacaagagcaaaactctgtcttaaaaaaaaaaaaaagtctggtccaggcgctagagcaagggttctcaaccttaggcactattgacatttgggctagagagtaaggggctgtcctgtatattggaagatgttgagcagcatccctggcctctacccacaaatgccagtagcaacatcacccccagttgtaacactgccaatgtctcctggggggccagatgatccccacttgtgaaccactgcactagatagatggttctcaaccctggctgcccaatagaaacacctgggcaatgtataaaatttacccctgcctgggccccacccagcactagcagaatcagacagcctcacgggcagcaaggggggagaaccactgaacagagctgctctggacattttggatctcttagccagtctaagattctacaagtaaacaacaatgtctgtaactttatatagccttgatgttctaacgtgttggtcggttcctccattagaccaaatctctccagaagcaggaaccatatcttctttttccctgtctccacaaagctgtatgcagtgcctcttattttatactaatcaaaaaagctgggcaagttcatgagcccccctccaccccaatttcagatgaagaagccactttcatctcccccagttcaacagcatatgacaagggagaatttgcaaagggaggaagggacagaagagatgggaatccaggaggacccagccacctgatctagccttggaacgagactgctctctgccagctgtggggaaagcttgctgagttgcagggatgcagggctaggtatactcatacttcctcagccccacctctcccggccagactggaaggcatgaagctggggtcttcagcagtaaactctagtctaccagatcggatgctgcattccccaggccgacagtgactcgagaacaaatgaacacaggcccagaacacctctatttggagcccgacttatgggctgggatctttctccctacacctccttcaagactccccaggagcatctggggacctggctgagagaggccagcccaatgttaacagatgcagtcatatctgcctcctgctcccctccccatcctgctcaccacctcttcagacaaggcaaagaggaatgcagtgtcaagaaagaatatttaaagccaaggtgggaggactgcttgagcccaggagtttgagaccagcctgggctgggcaacatagtgagacctcttctctacaatataaaaataaaggccaggtgcggtggctcacacctctaatcccaacactttgggaggccaaggcaggaggatcatgaggtcaggaattcaagaccagcctggctagtatggtgaaagcccgtctctactaaaaatacaaaaattagccaggcgtggtgacacgtgcctatagtcccagctactcgggaggctgaggcaggagaattgcttgaacccaggagtcggaggttgcagtgagccaagatcacaccactgcactccagcctgggaaacagagcaagactccgtctcaaaaataaaaataaaaatagccggacatggtggtgcacacctgtagtctcagctacttgggaggctgaggcaggggtatagcttgagcccacaaattccaggttatagtgagccattactgtgacactgtactccagcctaggcaatatagcaagaccctgtctctctaaaaaaaaaaaaaaaaaaaaaaaaaaaggaaagaaagacaatatttggatatgaacccctatcttttttaagaagtggaagtgcatttgctatctactcattccttaacagatacatagagaatacttagaggggcagacatgccatccttcccgattgtttttttgagacagaatctcactctgttgcccaggctggcatgcagtggcgtgatttcggctcactgcagcctctacctcccagattcaaacaattctcatgcctcagcctcccgagtagctgggattacaggcatgccccaccatgcccagctaatttttgtatttttaatagagacagggtttcgccatgttgctcaggctggtctcgaactcctgagctcaggtgatccacctgcctcagcctcccaaagtgctgggattacaggcatgagccaccacacccagcccgttccccatttttatacttgggttaagctcacagacaaaatgatggggatagaatccagggaccaagctccccaagacagcaaaggctattcaagtgcccgcaatcagctttcttactaaaactcactgactaatacacaagaatgcaaactgccaatgtgtttaccttacatttaatgaatggtttagtgttttctctgagattttacttatttgatattccatgacaacaggatgagcaatccttaaagacctgcttcaggcagccctggctggcttgctgaaatcagtgtagagcagtgaaggcttccatcctgagtgaccagcgtgacagtgatttttttttttaagcttccctcccttccattagacacacacacacacacacacacacacaaacacacacacacacaccctgttgcctagagactggacacattcctggtgcttactcttcttttcattctccagaagcaggagctttagaaactggggcctccaggaaatatgcctggggccggggtgaagggggtccaggagtgacatttcctcatagccaggcccgccccatccccgctgccctccctttcctcccgaggtttgaaaagccccagcaggctggaactgaaaggcttccacagggaacaaaacaaggccccctttgaaagcctgtgtttaccccgggtgcagccaggggttgccatggccacggtccaccttggcgggccaggcccgcctggagcagcctcagcgcctggccgtcccaccccaattccttcctaggggaccctactggcacccctctcctgggcccccttgactgctggaagcatggattttcatcaagtcccccaagctgaaaacataatcctggagagactgaaagaggattaagcctccctctggggctcctgagagaaagaccaggggacttgaccagccctgtccacacccacctccgctgttgctgtcctgtctcctgggccagtgacccacccgctgctaatgagaatgacttatttatgtcattcattatcgctatgtcctggagccaagcagcatcaggggaggccagaccaggagtggggcaaagaggaaagggagggtctctcctctcagcctcaacctgaatctgtcaggccctgtgggctgcgggaaaccacagaggccttgtgacccaaggacaaaagcggctgaggacatggcaggacagtgtggactcccagggcccctgagtgcacaagcctggccagggaagctcagccctccctggctccacattcctcctttggcccttccccaggagaagccagagggagcagaggctctaaataattcagccctccaattgctctgtggtcagagcttcttcatttattttttaactctccaggctccacagtttcgcaatggaagcactctaatcccagccctcacaaccaggtgcctctcaagcccccagcccaggatggcagggaaggaggcacccaacttctaggattctgcagactcatccctaaggttcaacacatcttgaggcctcagggacagtggctgggatgcagatgggcagcgggaggagaggaggcagtgctggctccagggctgtttccacagagcatggcactactgtgctggcagaactggattaatagaaagacctgagccgcaacccgggtgaggctcagatccacctctgtcagcagctccactctcctgcgcactgctcctctagcctcctatctatcctttctcagggcttcttcctgcacccccagcccatcccgcccccatacagccctccacgttcattcacactttttttttttttgaaacggtgtctcgctgtatcaccacgctggagtacagtggcgtgatctcggctcactgcaacctccgcctcctgggttcaagcgattctcctgcctcagcctcccaagtagctggaactacaggcatacaccaccacgtcaagctaatttttgtatttttagtagagacagggtttcaccatgttggccaggatggtctccatcttttgacctcgtgatctgcccacctcggcctcccaaagtgctgggattacaggtgtgagccaccgcacccagccctcattcttactcttaaagggcctgggcaccctgccatggttccctggaatcagcctggcctcagcttctattaataatattagttaacatttgattgcacattcatttcatgtgatcctcacagtaaccacacaaagcaggtactatggatatcctcatttcacaaatgaggaaactaaaactcagggaggtttagaaatctgcccagaggcctggcgtggtggctcacacctgtcatcccaacactttgggaagccgagttgggaggatcacttgagcccaggggttcaagaccagcctgggaaacatggtgaaatctcatctctacaaaaaatacaaaaattagtgagatgtggcagcatgcaccggtagtcccagctactcaggaggctgaggcaggaggatgcttgaacctgggaggtctaggttgcagtaagccgagactgtgccactgcactccagcctgggtgacaaagtgagaccctgtctcaaaaaaaaaaaaacagaaaaagaaaaaaatctgcctagaggctgggcacagtggctcctgcctataatctcaacactttaggagattggtaggatcaccagcctgggcaacatagcaagaccctatctctacaaataatttttaaaattagtcaggcatggtggtgagtgcctgtagtcccagctactcagggaagctgaggtgggaaaaccccttgagcccaggggatccaggctgcagtgagctgtgatggtgctactgcactccagctgggacgacagagagagacctagtctcaagaaaaactaaaaaataaatctaaaattctgcctaggtaggaaataagcatgagaagccaaaaaataaaataaaataattgtaataaaaaatttgttataatctgcctaagtcacacagagagtgaagaacaagactcaaagccagctgcctaatcccagtcttcaggccttaactcccatgctatatggacacaggctgcacacacaggatcctcaagcccagagtcacaggcacacagccagttgagacagtctagggacaaggactttggtctagggaccaaagtgccatatccggcctaacatcctttctccattacacagtttcaagtgtagaagcatctgtatttacgcaggtgataaatacacgtttactctctggtttatgatgtcatggcctaacgccctataaacctagcttaaccccagcaatgccctgtgctggccccggccctgactactccctcccatccctgctccatggccttccaacaaacagctcgcctgcctccaccaagacttttaaattctccctcacagcgttataatccttcccatgcccctttagggcagtacaatctccatgattcctaatgagagagctggcagcaccataccagagcacacatatgcaatacctgatagttctcagtgttcttacagacattacccagccagctcagcaaccctgaaccagctaaacatggacaacagctttttattttatttttaaattttatttatttattatttatttatttatttatttttaagacagagttttgctcttgttgcacaggctggagtgcagtggcgctatctcagctcagcgcaacctctgcctcccgggttcgagcgattctcctgcctcagcctcctgagtagctgggattacaggcatgtgccaccacgcccggctaattttatatttttggtagagatggggtttttccatgttggtcaggctggtctcgaacttctgacctcaggtgatctgcctgcctcagcctccaaaatgctgggattacaggcacgagccaccgtgcccagcctttttttttttttttttttttttttgaaaaggagtctcactctgtcacccaagcaggagtgcaatggcatgatcctggctcactgcaacctccaccttctgggttcaagcgattctcctgcctcagcctccagagtagctgggactacaggagtgtgacaccatgcctggctaatttttgtattttagtagagacgggctttcaccttgttggccaggctgatcttgaactcctgacctcaagtgatctgcctgccttggccccccaaagtgctgggattgcaggcatgagccaccatgcccggtctagctttttatttttttgagacgagatctcagtctgggtgaagactggagtgcagtggaacaatcccggctcaccgcagccttgaactcctgggctcaggtgatcctcccacctcagcctcccaagtagctgggactacaggcacacatcaccacgcccagctaatttttcaaattatgtgtagagatgtgggtggggggagagggtctcactatgttgcccaggctggtctcgaactcctgacctcaagtgatcctcccaccttggccccccagagtgctgacattacaggcgtgaaccatttcgcctgacctgaacagcttctggacgtgtctggccagctcatatccctcctgtgaggaccgcctctactcccattcacaggggaaagctcctaccccctggtgctgcgtgatcatgccctcctggccccagctgactggcccagtggtagacagctgatccacacaagcccatcagactctctcctcaggagttcacatcaaggctcagacaccattcagtaactaagggttactggaaagtggacgggtgtatttgggagctgaggggccataccacctggtgcacatccacagcagcagcggcgtcctgcaggtgcaccatgcagactcactgagaacagctgcgtcagccacccccaccacacccccacacacccccggcacttgggagaccaggcacttcctcctttgagtcttcaattcccctatggcttcaaatagctcgagctggtttctgttacttgccttcagtagagtctgaactgagagacaagctggcatcactatcctccctgtacagatgaggaaagaggctctagaggtgactaaatcaacatcatatagtcaacatgtaataaaggagccgttaaaaaccctgccatgtgactcttcttcagtgccatcccatgcctccttccctggattaaaggaagtggcaggtattccatttctgtcagtgtttaaaaaaaaaaaaaaaaatggtggcacagtaagcgattcagccagaggcactccaatggactgaagctggaaacaagaaattcaaaatcctctcctttagatcggcaaagacagctcttctctcctctacatttgccagccttccttgcagtgaggtcggccccatgtgaccagctctggacaatgtgaatggaagtaacaggtgtcagtttcctccatctctctcctcccctcccgcagtaaccttgaaggccctatattccagatgatgtggctacagatggaggtgcactgcctgacctacaagactttccacgagcaaaaaataaacctagatggtgtcaagcccctgggatgtcaggatttgattattcctgcagcataatccagcctctcctgactaaagcacaggaatttttcagcctgggcccttcagcaggatgctgcattcatttgtttaacattcatctgtttaacaaatatttctggagcaacagtgccaggtgctgtcatgggtataatcaagggcacagtagtttttaaaaaaatacaataactacccttaggaagcaccctatctggtgactcataagccccacttgggactaaaagaaacagttctacaggtgcaaagcagaactcccacgcagcccctggctaacctgagccccagagaagctaagctgccaggaggcaaagacagcttgtcctagtgactccaggagggtggcagccaagagtgagttcacaccaggctttcacacccaaggctctaccaactctactcctgccagccgtgtggctgtagacaagtgcttcccttgctctgggcgcagacacatgggagaaggcatcaaggaggagtcatcaagagagcaggtggctgatggaaaacagaagccgcaaaagacaccactcatcttccccaccctcctctgcagccgaaatgtctcctctgggaatcatctccctgtttcattttaactggaaaagtcccccatgactgagcttttctccccctatcccacatagcagaggactgagcagagaagtcattattctgtcaggaactggtgtctgggtatagtctcctttctttatgccaaaagctagataaaagttaggtagacagggttgccatatacagttatgcaggctgttcactacaacgtgcccatccaaaggggcaaatggagctcaaatccagcctacactctgcctaccaagctgtgtgacctacaggaagagcaccttcttctaattcacccaaaggtgtctgctgtatgccacagaagaactggagccagggcttctccataacagcaaagggaagttactatactaacctctctacttttgtagatgtttgacatttttcacagtaaaaggttaaaaccaaaaccaaataaacacctcaccaagtgagtgggtgtgttacttggccaggttacttaaccctcagcctcagttcccacatccaaaaagacaataatcgctggctcctagggtcagtataaggactaaactaaattacataagtagcatgtttgacatggagcaagtcctcttacaaatgggaactattaacagtagccactgctgatggctggggccaggaaggaaaacgaggtgaatggggacagagggacattgtctaaaaaagcaagcctttgggaaatgtgtgtggagaagccagagtccgaaaataagaccaccctattcatgttcctaaattgagcctggggggcagggctggtctgaaggagttctcatgcaaccccttcttcggtggcagcctttacacttccctggggaccccaggctcggctcagaatccaaattaaggtcagtgatccacagaaaggccacaaagagtggcttagaaaaggatgtgctcccggcctcccggcaaactcagagaagggcccggcagctgggaggtggagctggctgggctgggagtgctcacatctgaagtcctgaaagagaacaggacttttcctaagatgttccaggaggtcagccattagcacagagaggacacctgccaccttcatggggtgcgaatggcccactcacatccctgtaggtcaaaaactatttttgaattgtctagttttttttcgtttgtttgtttggtttgatttgttttttgagacagagtctcgctctgtcgcccaggctggagtacagtggtgttctctcagctcactgcaacctccgcctcctgggttcaagtgattctcctgcctcagcctcccaagtagctgacactacaagcatgcaccaccacacccagctaatttttgtactgttactagagatgggctttcaccatgttggccaggctggtcttgaactcctgacctcaggtgatccacccgccttggtctcccaaagtgctggtattacaggcgtgagccaccacacccggccaaattgtctagttttatgagatgaatttttatgttaatgtcttcaaaataatcactgctgccgggcgctgtggctcacgcctgtaatcccagcactttgggaggccgaggcgggtggatcacgaggtcaggagatcgagatcatcctggctaacacggtgaaaccccgtctctactaaaaatacaaaaaattagccaggcgtggtggcaggtgcctgtagtcccagctactcgggaggctgaggcaggagaatggcatgaacccaggaggcggagcttgcagtgagccgagatcgcgccactgcactccagcctgggtgacggagtgagactctgtctcaaaacaaaacaaaaacaaaaatgatcactgctatatgtgaattttaccagtagtctatttttaacgacatgcctccctattcttttcccttcaaggccttaggttccagagccttaccaggatgagagggctgatggtgacagtggcagtgaccggaagctgggagcccttcccaaagcccctggagggaactcaccactagcacgaaccgccaaggccctgggtgccagcctagtgcccgccctaggagactgacatggaaggcttctggcttcagtcaaatgccatctcactcatttgcctctcctttctttcttttccagaattaaagctcataggatgattcattctcttattaaatcagctcatgagaaaaagggaagtcacccgagttcccatccctctctccaccaaacataagccacgctgtggctcattccccatatgcatttaatagaaatgctaccacaaggaagaaattccactaagaaccccacccttcacctttcctttcatgtctcaagaattcaccatccatggcagttttctaagtttctaaggctgccagggggagaggtgagttggaatttaaagataagttcccaaataaaatgggataggaggggaaagagtcacgtggctcttaaatccacatacatgcaaccctcaaagcagatagtaaaaatccaccccaaaaaaaatccttctctatctctgccagatctcctcagctctgccccacacttagaaacagctgtttccccagaactccaaaaaaaactctcatatattccatccctcattgtttccaagactgtgatctgtacacttaatctacctctaggctcagtttatccctccctgggactgtcaaacaagaacagtaacagtcaaagaataagaatcctaacgctacaatattgtaaatacatctatggactcagcctcctggctttggagctcagatcctgcctcctcagctaactagcagtgtgaccttacgcaagttaacttaacctctctgtgcctcggtctcctcctgcataaagtgatgatactactgtctcatctaggattgattacataaattaatattcccaagatgcttagaaagcttactggcatatgcagtaagcatgcaataaatgttagttattattatttatttttttatatatatatatttttttttttttttttgagacggagcttcgctcttgttgcacaggctggtgtgcaatggtgcgatctcggctcactgcaacctctgcctcccaggttcaagtgattctcctgcctcagcctcctgcgtagctgggattacaggcatgcgccaccacgcccggctaattttgtatttttagtagagacagggtttctccatattggtcaggctggtctcgaactcccgacctcaggtgatctgcccgccttggcctcccaaagtgctgggattacaggcgtgagccactgcgcctggccattagccattattagactattacaagaatcttgtgccacagagattattcttaccagctctatttaacatatgtagtcaatagccatgtgttgttgtggagtataataatagattagcctcaagaaaactataaattaacaaactaagtgacctgctcagaatgacacagcccacacatggcagagctaagactggaactccagtcatcaactcctttgcacactcacacatttcacactttaacacactgtctccttcaggcatggagatttgagaagtcccacggatcagcatcaagaacagatttcaatctctacagagcgacagtatctccaggaatctttcaagattcaccaaacaaaattcatttccattcgtcttcatattccacgaaaacacaccaaagctgccttagggagagggtgtcgccccatcagaggtgtcaaggaccatgcaaggccaggggtcacactggcctcaacaatgtttcagacaaaaacggctcccttgggaggctccgaggctgtcatcgatttgctaaaggtcagtacggatcatttgggaatggatttgtgtaggcatggcctaagacacatggacttctgccaagcctatatatttttttcaaaacatctgcactgtcttcacccttgataaatagcagccaggctacagaaatatttccattacgcacaaaagcctgctttgccaccacaactcattgaaatggatgtttccaacttgagaagaactcttcaatgaaaacatctaaaaacaccccaatcttccagcagaggcaaccaatctagcattcaggaaacctttaaacactagtaaataatatttgtggaaacaaattctttggtagacatatgcccccatgcccaaagtctaactatatctaataaataggttaagcccatttcttctagctgtattatgaacattcatgcaaagacatccgcataaacatttttgtaaaggttttcccatatttccagaatgtggtgaaatctccttatggccatgctgaaaagaattggaataaaaagaatttaacattgtagccctggctttaccactaagtagctgtgtgatttcacaaaatgaaaataataacaataacagcagcagctaacatttaatgaggacttacaatatgcaaaacattgtgctaggggcttaataagtatttggtagtaattaacaatcattatgtaatattttggccgggcgtggtggctcatacctataatcccagcactttgggaggctgaggtgggcggatcagttgaggtcaggagttcaagaccagcctggccaacatggtgaaacactgtctctactaaaaatacaaaaattagctgggcatggggtaatggagggcgcctgtaatcccagctactcaggaggctgagacaggagaattacttgaacccgggcgggtggaggctgtgggtgacagagcaagactccacctcaaaaataaaaaataaaaaaaaaacaccaaaaaaccatttggtaatattattactcccactgtatggatcaggaaactaagactcagagagattgagtaacttgccccaagaacacagcagcaactagcagaggctgggatgaagcacaggcattctgattcagtattcttaattacataccattggtcttttcaaagcacttaacgacccacaacctcagattcctccaggagccaaccaagcaagcagtcttcagaatcctttccagctgtaaaattcagtgattctctcttttcaaaataaaatgaatttataactttgagaaataaaatgtaatgatgctctagtactgctgagggaaggaaacatctgtgtatgcctcacccagaaccagtcaggggaggaaaactgctgattttctagggtaatgatgtcctgtgaaccaaccagactggcctcaagccgtctcaggaaaaatgacagcttgaagttctcaaaggatccaccaacatgcaaaggtctgcaagttcgcaactatcagttctcaaactttaatttgacttttttttttttaaaggaaactcatatgcaagaaaatgctgcaccgtagaggctgatcttaagaatgccagtacaagatgtatgttgactctgtggcatgctcacacttgctttcctttcaggtgtacacctgctcagggaaaatccacccggcccaggcaatctgttttaagacttccctagctcgaggctcagtggtcctgtaattgggtgggggttttgtcctttgcacatctgatatcttcatacgctccctcctgctcatcatcaccagcccggtctctggacacacaaacacgcaagtgctgccttccccaactccatctcggacgcatcttcttcctctctctgctcaacacaggagttccctgttcacacaccttgccattggctgacacagccaatggtgaaactcccccagctgaccctccctggagctcactagctctctcccagctgtgggtacagcctgaaaccgaaactaatctcagaccagagcaaagtgaaatcatttcaggagcctgatcaccctacatgaccacagagaggcttccccttaacagagctccaaatccagcttgctggtcaccaggagaaaaaaaaaaaaaaaaagctttgcagtgccctcctaacatcaaatactttcttaatgaatagggaatcatgggattagaggaggaagcaaaagttcttgccgtcgtgtttgctgctgctacttctctcttatttgcacaagtctatttcagttcaccccgtgagctaaagttcaccacccggtattatttttaaactcattgtccagcatccgttcatatttggttcactcttaatcagattatcttccaagagcaagctttgttctcttctgagatccctgtaaccatcttgctgtaatgtggctgagactgttatactacatgtttttcgtaaatttgaaaaacgaagcgttttacttttgtgctcgagccaggcacggtggctcacacctgtaatcccagtactttgggaggctaaggcgagtggatctcttgagctcaggagttcgagaccagccaggccaacatggtgaaactccatctttactaaaaacacaaaaaaattagctgtttgtgatggcgtatgtctgtaatcccagcttctcgggaggctgagacacaagaatcatttgaaactgggaggcagaggttgcagtgagctgagatcacaccacactgcactccagcctgggtgaaagagcaagaccctgtctcataaataaataaataataaaaaataaaaacacttttgtgcttggaacaatacaaaagaaaaaaagcaaaagccattatgactgaacataatgtcaggccttgatgatccttcaaagaagtataaatgttgagaaggatcctaaactgtgttttctcttcttacccttgcccccagcatacttgtgggcagctttctttgtggctaggcagtattatgaaaaaaagcctactgtcagcttaagcaaaacagaataagaagggttaagtgcactggcctaacaagggtatggtcaaagagaaattaagtcttggattatctgttatttactcattcatccaacaaagtttactgagggcctcatatatatgcctaaaactcttctaggtgcatctaggagataacccactagctccaactgagagtgccattctcagaaacactgtgtgtatgggggctgatgctttctgtattccaataccaagacaaatgctccactacttccaggtttcctgagctctcctcacacggcttggactccatccccgagagctgtaggtccctcccagtgagcacccccgggtgatgctgaccaggaacattgcgggccagggtcacctggcccagagctgttgggcagactctgtttgtgccttggctcactcattcatggatgagctgctcagtgttatcgggcattcttcaatcactccaacagtcaaaggaggggttaggccaaatttaagtaatcttctagctcaaaaattccagctccttttatcctccgatcaccgagctgacatggacctctaggggcctctacttcatcttcctgtctccagatgaaacctcttaaaccacaaagacaaatgaaacttgttcccatttctgaagaccttcaggggaggccattcccctctgtgcctatgagtcacttttcttacatctcacatcctatctggaatgtcttcctcataccttacttgaatcctccctctgtagtttaaattcatttgcctctggttctaagtgcagagagacaagagtgaatcactgtgttctgagcaatgactcttaagggacttttatgtcttcttcaccatgttcactgcaggcattacaagaggtggcagtgtttctcagctgttaaaaaccacaaaggcatcaggaaagctgaccacactgcccagttcctgcctcaccctggcaagggtgctacagaatccagaaaacctgacccttctctgaaacccacaccgctacttagctctactcagagttcaccaagggggagaacaatgtgctcccatgccagatcaaaagcccaggaggcagcagccactttatcttgtcctcactcagctcaagcggcccctcctccaggaagccttccctgccccaactcctcttctggctggcaaagtgcccccttcctcagtgctttgtcttatcgcagcacttgccacagaaactgaaattccaggctaacatgtttgtctcccttactagacaggaggcatcttgaaggcaggggccatggcttgatgacctttgtgctccaggatgggccccagcagagtatctggcacttggccagtggttctcagcagactctgttaagctgaaccctccaggcatgttccaacgatgcctggacattgcactggcagcccttcaagcaggacacaaatcccacaacccccccagctccaccctcccccaccacgaccacccccgagctcagtaggggtgtctctgacatacttttttttttttttttttttttttttgaggtagggtcttgctctgacacccaggctggagtgcagtggtgcaatttcagctcactgcaacctcggcctcccaggctcaagcgatcctcccacctacgcctcctgagtagctgggactacagatacatgccaccacgcctagctaatttttgtagagatgaggtttcaccatgttgcccaggctggtttagaactcttgagctcaagtgatctgccaacctcagtctctcaaagtgctaggattacaggcatgaactaccacacccagccctgacagtttctctaagggtgtgggcctgcagccagacttcctgaattcaaatcctggctctgccactttctagccatgtgatcttgggcaagttatttaaactcttgatgtctcttatgtctctatttcttcacctgaaaaattggtataatatctcataggtcctgtgaagattcaacgagctaatccatgtgaagtacttggaaagggtccgacccctctgtgagtgctgcaatgattatttcccaagcctatcccttcacagaaacccttggcccccacagcttccactcttttcgtttttgagacagagtctcactctgtcacccaggctggagtgtagtggcgcgatctcggctcactgcaacttctgcctcctgggttcaagcgattctcctgcctcagcttcccaagtagctgggactacaggcgcctgccgccaaacctggataatttttttgtactttagtagagacgggggtttcaccatgttgcccaggttggtcttcaactcctgagctcaggcaatctgcctgcctcagcctgctaaagtgctaggattacagatatgagccaccgtgtccagcctcttttttatttttttatttatttatttttttttttttgagacagagtctcgctctgtcgcccaggctggagtgtaacgctgtgatctctgctcactgaaacctccgcctcctgggttcaagctattctcctgcctcagcctcctgggtagctgagattacaggcgcccaccaccatgcccggctaatttttgtatttttagtagagacagggtttcaccacgttggccaggctggtctcgaactcctgacctcaggtgatccgcccgcctcggcctcccaaagtgctgggattacaggcgtgagccactgcaccctgtgagcttgcactcttgactgcctattgggcctgccccgatctcctgactaggttcccttcctccagggaactctgccctgttcctctggaccaatgttagtattaactttatgccattcaacccttctcactggttatgcctcctcacccctcccccagcttacagggcaaattctccaaagaaaaggaaaaagagttggttccacagcagggctacagatgctgagtcattctgcccccaaatatgcttagctgtcacccatgacatttcagtctccccacccccgcctccactgtgcggtcctctctgctcatcattcaagagcctcaccccaccccctcccactcttccaaaatccaccctcagcctctacagtttttaccaaagattttccttaataatgagcctcagaatttgtgtaccgctgtgcagaaatggcaataataataatagcttcgatgtaatgaacacttcctctttgtctggcatacacatgagatctcttttaactctttctaaatataggaaactctggcacttacaaagtcttagagtaagatggagagctgggattctacctggagatgcctaacttcagatcttacactctaaacaactaagctatgatgaaaatgtgcacaaaataactcagttgcttcctgggggtggaagttaagccagtggagttggaacttttttttttttgagacagagtctcactctgttgtccaggctagagtccagtggtgcaatctcagctcactgcaacctccgcctcccgagttcaaatgattctcctgcctcagcctcccaagtagctggggttacaagtacgcaccaccatgcccggctaattttttgtatttttagtagagataggtttcaccatgttggccaggctggtctcgaactcctgacctcaggtgatccacccgcctcagcctcccaaagtgctgggattacaggcaggagccaccacgcccagcctaaacatttttatcttaccaagaattcctcaaagacccttggtgctgccacaatgcaaatgaaatggtcacatttataagaagggagtttatatttacaaggactgttatcacatttatcatttatgacctgctttaaagataagacatttagctgcatcatcaagagtctgtgataatgcgctgacacatcagaggttctgggagcctggaagccaaggggatcagagaaacactgagtgagccaacacagctagcatcctgaactcaccaacccatggtagccagggccacagcatgactgagaagtcatggccactggggaaggtgaatcctcagtcactgcaacaaggactttgcatgccaccaagacactttcaattcccaagtcaaggaccactggaccacagcgctttagggtctccaatgcccttcattttattttattttattttattttatttatttatttatgttttttttttggagacaaagttttgctcttgtcatccaggttggagtgcaatggcacaacttcggctcactgcaacctccacctcccaggttcaagcaattctcctgcctcagtctcctgagtagctgggattacaggcacacgccaccacacccagcaaatttttgtatttttagtagagacggggtttcaccatgttggccagactagtcttaaactcctgacctcaggtgatccacccccctcggcctcccagagtggtgggattacaggcatgagccaccgcatccggcctccaatgccctttatagctcttgcttcctgtaagtgcaagagccagcaacacagaagcaccacctcctccagctcaccttggatagtcagaggtgacccctgtcagacacccagcttcctgtgccccaaggctctagaatactcctgcctctgctgcttattaccagagcaaatgtaggaagctctaaaggaagaataccagtgtgagtgctgccatatgccaaacactgtgctctctagttaaacaaagaaaaatcccctacagctctctgtgggggacttgagcctaaggaagtcttctcagtcccaaggtagagaagtcacaaatggcagatcgtcctaaagctcttccagatccctagcaagtgtagatgccacaaacacctatgcagcagcccaggacccagtgagccaagaaaggaaaggcaggccaggcctcctctggcctggggctgcactggggatagtgacagcagccctctggcccccacttgccttcaagagtccaaagggatctaaggaaccgacaacacccagatcatagccttggacaattctgccccaagacctccttaagagtcgtctttcacacttaacactctctactaaagcacctcaaccccatttccccaagaacaagctggagctcttaaaggcctggatctcacacccagctgaaacaccagaatatccacctccacccaaatccctttatttacctctaattcaatagaccagtgggcctagtccagtgcccagggccttcccaccacacagacagcaaaatgagcccctggaaaagggccacctcatctgcccccatcctctagctagctgtagggagctgggatctgtccagacactccaggtctccatggccacaagcccaaagttgcatagggaggtcatgagaaaagaccttagaagcagtctgctctttgaaccctgggattattcactgaccagccaaaaaggtgacaactgttctgatggcccaggtcagaccagtaactctagggcagaggtctcaatggaggtcctggttccaagggggtatattaaccgtctggtgttgaatacaggtgtctccctacacacatgcattttggaaggagaggagttagagctttcaccagattctcaaaggggcccatgactccaacctctggccctagttggcctggcccaggagctggggatacagccctagtcatatcaacatccctgggccatcctcgctgtccagggtctctcttctattcaaggatgtgcccaggtcggtagcagtatcctgtttcccttgtcctggcccttccagctgcagaaagtggacagcgggtttcacacccagccctgctgcacacgctccagcttcctggagacccgagccaggtttctcccagcagcacctctccatcccagagatggcaccatattcaaactgaggtaccagtggcactgacccccaacaacagagaggacccagcttcacacttgatccagcaggggcccaaccacatggtgagatgacttcctccgtgagagaattcctggggtccctcacctccttcaggcacagctggctataaagaaaaggggtgaaaggcccagtacatctccctgagtcctttctcctgggccaggtggctcaggtgctgcgggatcacccagggaaggctcattcctctcgctacaagacgctgactgcggatcaggtggggagcacggtggatggtcttcttgtatcctctatcgcctccagggcatcttgtttctaaactcccagggagtcccctcatcttctactccactactccaccaaaaaaaggaaaatctaaaccctccctccccttaaaacacattccgtctcaggaatttaatttcagtgtacgtttcttagagctaaaactttttttaaggggaaaagaaatgggcagggcagtgctgggtgtaaggcgaccacgcgaccgagaaaaggaagagggaggaatgaataaacgctgacaccagccccccttggagctcagagcctggggcacaggagccggcggggcgggcgagcaggggcggggacagcgcattcccaactttccctggccgagctgacgggagatacagctcccaggggaccgggagggaccaaaaaaggctgagccgacctgtgacatcggcggggggcaggaagcgaagctcccctccccctgaaaggcgctcggctcccagcaggcgcccccgcctgccgtcgccgcccagcctgcgcccccaggcccgggcactgcggggaggggcgcccacacaaaagggggagcggcgggagaggggactcgggcgaagccggctccgggaggcctcgtctcccttccctgcggcgctggcccgcgccccccggtctaatcgcgcgccccgctcccggccccccagatgcccgcacgccccccgcgcccggggcccgggatgaggtgggggctcgggaaggaagggcgggcggggacctgccgcacgcggagctcccggggagccgcgccgacagccccgggaatcaaactcgcgacggcccggccctcccggcggcgcctgggcaacgggtcccgagaaggtggggccgctgggccggggccgcggccgggattgcgcgcggggcgccggcgaggaccgcgcccggggccgggcgggagccgcgggagcgcgggggtcttaccgggcagcgccacgcgcgtccgctccgcgcgggccgcaggggccgggccgcgggccgggcgggggaggggctgcaatccgcagcggtggcggcggggccaggctcggcggcggcggcgcggctggggcgcggggaggcggagaaagtgaggcgaggccggcttcctagcggcgggcggcgagaaatgcagctgtccctgcgcggctgccggcagggccacaagtggggccgcgcggggaggagcggggctgcgggcggggcggggcgggggcccggctgcggcgcccccgggccctttccctatggccgacccctttccagagaggagggaagcggacctgggggtccggaaacctacatggttgccgggggtggagaggggagcacccagtgaaggctggaaaaatgccctccgtgtacctccctccccggccgcagtgactccctagcttgcgggcaggagggcgtgagcggggtgcctcgacctcccgcgcagagcggggtgcggggcatcctgcccctcccagctgcggagagggtgggcggaggagacctgagacctccgagactccgcggggagctaagagcagggctgcccgacaggttccaggtcagtgccaggaacccagggtgaggacgcacagctggggcttgggacacaggtgtggaggaggggcacctccctggaattagggccccggaaaggaaaccaaatcaaatgctgaggacacaggagatggtgggaagggggagcaaatcaaagctatcactcgtccacaccgacagataccacctgccatctcccattttctcctcccccaacctccccagcatccctgatcacttcaagggctgctgagccctgggaagattttccacggaagaacttgtttaataaatgggaaactgacctttgctatacttttcccacgtgctttcatttcagactccaatttgggagtaggtagcctaggtcaggtggtgaccaccaagcaccctgctacctaggggatctgaggagggtgaagaaggccagatgcaaactaagctctgtccccaaacaacttgcaaagggtctgcaccctcctcctggaaaagtctgccttacagacccatttgcccatctgggcccagaaccccaggaatagcccccctctcccctcctctgagcgcttgcaatttgctagccttgctgagacagatcgacacgctcagcctcagagacagctgatggtaaaaaccacaaaccaaagtgccccagacaccaatgtgtttccatcatttgcatgtcaagggcaagtttcttcagcaaggtgggaaactgggagggggagaaacctcagaaccacaccctcctcggggaggcccaacgttaggttagcatgttgaacggaactccaggactgggtttccaaacccctctgaggatctcctctctcctgctcctctctccccacacttcactccctggtgcattcaatttccgggggaggcagggtgcttgaaatcccagaagatggtcttcaggccccaggttaaagattcttaatccgaagggacagacccatgcctctatactgactcctggctcctttccca

SEQ ID NO: 137 - DNA, 471066 bp, Homo sapiens
  source 1..471066: mol_type = genomic DNA
acagtgccctgctgtgcgcggcgtcaccgcatctagggtggaggctcgcaacgtgccccccgacgccagcgcgctcccacccaccggcgagtcaaggttgcgttggggagacagtgaaccccgttcccgacatcaggggcctccccttggggaaactgaggcccctggccagctgcgcaagacctggggacacgcgtgttctctaaatcttgggactttcatttccagcctcttcctccaaaaatgccgaattcactgcgccaaccctcgaactcacttgaaaagcaattgttttccacttgcgcgttttattttgtatcctatgcagattctatttacatatgcattttgagattaaggaatttggggacttgttttaactaattactcgttcagtgaagtacgggagagtcaaagaacagtattcctactggaaactccaagtcacacgtgtgtataatcaatgaaagatgacgatcataaaacgtgtgctttcgccagctttccgcgaggagagaaatcaaaagagaatttattttttggtttgcattttagcatttctgtaaacttgggaccacgctttccgttttcagtgagtgcacccacactttccaactttctgcgcccaaagttgcaacaaaccaaggtgtctgaaccacaggaagtttcttgggctgttccgctgaagcggcgcggggggacacagaactgggctcccagacttttcctgtcgtggcctaaactggaacggcttgggcgaatgggggctgccgggacccccagcgctaccgccgttggggtgcgttcgggtgcgacgctggcaccgccgctgtccgggtgtggggcatccacgcgcgcggccccctgagagggtcagggctgtttccccctcaactccactcctccaaacatgccacgctgttcctggtcgtgtcggtgtcccggtcctcgctgggcgcagagggatcagagtgttgccgtccaccgtcggggcgcctcccacgcacgctgctgcggggggcctgggccacgcaggggtcgggtgtggggggtcccgggcaggtggtagcggcgtctccgcgctctgtacactaaccactacaggggcgctccgacgttccccccaaccggagtcttgaaggcgctgcgctcggccaccgcgggcgatcgcgatcccagcgggagaccccccccacccccgcagccctccccaggtgcgcggtgccgggggaccccgggcgctgccctccagcgccccctcggggccgggtctgtggccggcgcgaccgcggactttggggggggttgtcccgaggggcgggggtcgccggtcggcccgcggaggggagggggagggcggcggtgggggggttgggggagcaggggccggggccgcgcgcgcgaggccgggccgcggccgccgcgccctggggctgcgactccggctccggctcgggctcgccatggctgcggcggtgccgtgaggaggagtccgcgtcctcggtggcggcggcggcggccggctccaggccgggttttggcgccgcccgcctgctgcctcctggcggctcctgaactccagccccctctctatcagccgctcactccgtctcaatatgtctcaagatggcggccaatgtgggatcgatgtttcaatattggaagcgctttgatttacagcagctgcaggtcaggctcctccgcgctcggcctcgcgcccgggggtgggggctgcgggcggtcgcggcctccgccgggggccccgggctggcccagccgccggggggcccgcggcggcggggaggaggggggtgccgggcaccgcggggccgagtcggggccgagtccctcccgctccccggcccccattgatcactcgcttgatcggaaattgatcctctttgttcaattcatcgatcagcccaagatggcgccgggagccgccgccgccaccactgcccccggtgtctgcccccaccccgggcgcccccccgggccccgcgccgccgccgccgccagcgccgccgccgccgttgccgccgcgggaccggggagggggcggccccggcggcccgcggggtgcgcgcgcgagcggggagcggggagcgggcggcggggggcgggcggcggcgggcgccgggagggggccgcggcccggcggtggcgcccgcccgcccgctcgccccgcgcccccggcccgccgtattcccggggaaagtttgtggggagttgctgcggggggtgaagcgcctgcctctccaggaggagccgccgccactgccgccggcgcggcggagctggggctggtggcgctgtggtgccgccggctcgggggagggtcagagcggccaccggcggcggcggcggcggcgcggcccggctccggccaggcgggcgggtggccgggcaggcgcccgcgctcgctacccccggccggccccggccgccgcccccggctgtcaccggcccgggccgcgccgccgctccggcaccccgcgtgtggctcccggcgcggacccccgggtttgtttacgtcccggggagcgccccggggccacccgcgcacctcgcggccgccgcgctcttttgtgtgcctgtgtcggtgacgcggacctgttcctccgtggcggacccccgcgggggctctttggggaaacttggcgaggggcggcgggggtgccccgcgcgcagtgtcgctgggtcccggtgtcccggaccgccgggtgcgggcgcgggaggaggaggctgcaactttcccctaggcaggccccaagctgttcccccgggtgcccgggcagtgtacgctgcctccccgccgccggtccgagccgcgatcgccgcgcgcctgggggctccggcggcccccggtgacctgcggcgccgggtcccttccttgcgtcccctcggggcttctgccctctctgcagggcccgccatggagcgcgcggcgggtgcgctcggagatgccttctcgggccgggttctcgaaagcagagccccgggggcccgttgggaccgtggcatgccgggcggtggtccgcgcgcggagtccccggcgccgcggggggaccgtgccggggctccccggcccgcgcccgagtcgccgccgtgcccaaggggcgagtgcctgcctgccaccccccgcccggaggagcggcgcacccttagggtccgccccgcacgtgccagctcggcgcccgcggcgccgggacagccccgggactctgccaggtggatgttgtgcgtagccggagccaggttgaaggtgagcggcgtgtgggccagaagtcccgaggttgcaggcgcggagggaaccggggatgtcggggggtgcccgggtcccgcggcttagaatgctctagggcggcctggtgctctgggaggggataggagggttcctcagggcccctggggaactgcagctactcccaactgctaaggtgtgcgtgaagataaacttggctgaactttcctaacctggaggactggtgacagtgacctaccgcaatacctttgggagcaaagctcgagatgcaggcttgtatcaaacgaagcgggttggattaaaacatatttaaatggaatctgacaactttaattgtatatgcttgttttctgctcttgcctactaagaacgataaagccgagtcatagtcgttatgaaatttcctgaaatttctcgcttaactaggaagaagactatgcgaaatatgtatttccgataagattaaaacttaaaggagtttaagtatttattgactaaaatagattactccaaagtgtctattgtgtaaattagattcctggatgtaatgaacacagccgaatggcatttttgataaattggtctaccctgttttagtaaaaatagctcccttttaccataatttaattcctgtgcttactgtaaaacccgttgtggagttttaaggacaaacattattattatttttctctcttgtcttcctaaatgtgacatcctagcttaatatcaatgaagtgtcttttttaaagcatcctggcaaaattgcctggaaaatggatttggtttctagagttactagattttaagaactctaaaccttcctgtcccccatattagctacttcttcaggggatcagggctccagggttccatcgaaagtttccatgtcagtttacttgcactttatgtggatattaagaagaaatcaaaaccaaaccccaaaacaaagtcccttatttgaacttcattcctctttactcctttgcttttggtggttgctaacgatttggccttagatgatttcctatgggtttgcaaactttagtcgaatacggaatgtcaaagttcaagtctcaggccaatctggttctttctctgggcggtgaggaggcctttggagttggtgtctggttaattcccaccgatagtcagtgagtcaatagaacgagtttgggagagaattcattagttccagatttttctcatttttccagacctctttatactgagattgggttgccacctgggggtaaagaggctgatcggtctttgcagagagaaatccaggttggagacgtcagcgggtccaggtgaggttgggccgttccgcagttctgcaaccctggctcactgggttcttgtccctcggcttcctgggtcttgaagctgctgccttggcacaggagtgtgtgctcaggaagagaatttctgaagattgtgttttattccgtttcctttttagtcccaaaggcttgtggtatggaagtttcagtgctttggtattgctaagactagttggacaagttttttatcctatctcagacttgtaaaaaccaggttttcttttctttttaaataagaaaagcactgttgtataaatttgtcttttaaatacatatttgaaaggaggacactttctaagacaaagctcatggcactctgtatgttagtggagctttgaactctttgggacggggcccgccaatgactgccttccctttgggacattattcccacatggtgaccagccttcccctttaagcagcttctgcaaaagtaaacttgaaaagttgccttctttttcagaatcaaaaaacaatttcagttttgctgaaagtccattttctgatggctttttttccccctgttgtggaagtgtgtatgttactggctgtccagtactgtttgccataataagtatattattttaattaaaatgtcccatctagtaccctttataaaagagcagttcaagaaattacaccactgctgctcctgcttttgttttcttggttcttttaatatgggtgtctttgaggttggatgtgggaaggggtcattggcagttgatttaagttttttcctatgtgaaactctttttttccttaaaggtgcaagtggtgagttaatgcaacaactcctggtacagttgagtccacagagagccctttgactacatcctcggcttcgtgtatcttctgtcggtagttagccaacctaagaaagctgaaagggccaaatagtccaataccttcaggaatgattctctcctaaatccactgagctaaccttaaaaatgcagtctggtgaactgtgctgagcctgaaacctttaatggctatttaaaaagtctcctgtttttgtacaattaagacaaacccatcagggtttatatgggagctgtgaaggaacagtagtttgtgctctctgattcccttctgggtctacctgtagcagtaaacaatcaaaaccactcctgaggctgtactcactttctgtgtcttaggagagaacacaagactagaagtagaaaatccacatttgtttcagctcctctgtaatgccccaggaacgtctgtttttagtgaaatgaaggaaggacacgtttgttaggggaaaactcatacatttcgtaagcagagaaattcatcatatgaagaatcctacagaggtaggttaaattcctacccgtgcttccatttcaaatagtttacacatttgtcacatgtaaatttcacagacaggtatatctgacgaattgtaacacaaatggtatgtaaaaggcaactctaaccattattcaaatatacaggatccaggatcgtgagttattgtagaaattacttaagacctatttaaaattattgaatacataactttaaaaaatgtaattgctctatgaaaagtgacttttattataattgtcaaagacagaaatttgtctgtcttgtccttttgttttgtctgaagccccgcgttatcgctgcagagagagagttttggtttccaccgaaatttccctgcctccgattgtttaaaccagacccttaatcttattttaacatatttaaaatgttcacaaaacccggaagaattgttttgtgtaagtagcaagcgagtgtagcttaaacactcaagcaattctggtatctaattggaaacaggtggaattcttggaatcccatgtttgagtctttttatagcaaagcccagggacacttttcacttatagccattcgttttgtcgaagctatttgaagaggggccccacagcctctccttatgtcccactgttgcttacctggacaaagcagtcgtgctgggcgctttaggaactggatacctgtgaatgcctggatgccgagagaagtgtgtgtgtgtgccgataatggagtgaaaaaggaatctaatggtatagttagacaagcaatttaatatctgcattgttatatgactttagagcaaagaatttgtgaattcatttgtgatttctgacttgatgaaccttgactgaccagagcatgtaggtacattttattataccccaataatgatatagaattcagagagaagatactcccccccgcccccaaaaaaattctacatttagagaatataagctccaccagcaaccataaaagtattaacttggtgagggggatattttctttctttttttttttttttgagacagagtctcgctctttcgcccaggccggagtgcagaggcactatctcagctcactgcaaactccgcctcccgggttcacaccattctcctgcctcagcctcccgagtagctgggactacaggcgctggccaccaggcctggctaattttttgtatttttagtagagacggggtttcaccgtgttagcccggatggtctcgatctcctcacttagtgatccgcccgccttggcctcccgaagtgctgggattacaggcgtgagccaccgtgcccggcccctattttcttttcttttctttttttcttttttcttttttttttttttttttttttttttgagacgtggttctgtcgcccaggctggagtgcagtggtgcgatctcggctcactgcaagctccgcctccagggttcaggccattctccttccttagtctcccgagtagctgggacgataggcgcccgccaccatgcctggctagtttttttgtttttttgtttttttttttttttgagatgtagtctggttctgtggcccaggctggagtgcagtggcgcgatctcggctcactgcaagctgagcctcccgggttcacgccattctcctgcctcagcctccggagtagctgggactacaggcgcccgccaccacgcccggctaattttttctatttttagttgagacgaggtttcactgtgttagccaggatggtctcgatctcctgacctcgtgatctgcccgcctcggcctcccaaagtgctgggattacaggcgtgagccaccgtgcccggccgatgttttcttaaatattaatggcagggccctctggattgactgtgttatttgacccattccagttttcaaggcgtggtcttgaaaagctgtcgatcaccctggttttgggatgtgtttcagaaccaagtttcgatggtgtgtcagtgttggattttcctgctgaggacagctaaggtttggtatggagcagttttggatttgctgagctgtaatcagtccagcttctctgctgtcttctgagaaggttgatggaggagagtggtctttggcggggatggaggtttccctgcaggaaatgaaccaggactgaggggaacctgtgccgttcccctcatttgtcctgcgcctgaaacagctttgaagcacctggcttgtgacttaaaagatttttaaaaagcatttgtgctgccctattcgggtattacacagtgagggtgaaccattcttttcgaaagacgtctaaggccgggcacggtggctcatgcctgtaatcccagcactttgggaggccaaggcaggcagatcacttgaggtcagaagttcgagaccagcctggccaacatggcaaaacctcatctctactaaaaatacaaaaattagcctggcgtggtggcgcatatccataatcccagatactcggcaggctgaggcatgagaattgcttgagcccaggaggtggaggttgcagtgagctgagatcgtgtgactgctctgcatgcagcctgggtgacagagcgagactctgtctcagaaaaaaaaaaaaaaaagacatctaatttgttgtaaaacctgtcaagaaccttccctttaaaaagctaatgcctctctaataaaaataattttaattttgttgtaattaaattcagagaggatgatgttagtgcacaaaataaagattgtcaatttctttattttaatccaacggcatttcctaactgcaggaggcccaggaccgttggcagaaattttgtgttgattagagcctcgggccatgggaagtgcaggtactgtggccacaaagttcgtcgcccaatccctggctgaccccacaagcaggactggtacagatcccaccctcaggggtcttcctacacagagaaacataatcacacaggtgactggaacggagccaaggatggtggtgttcctcctagggatttactaacactgccagcaactcaagaactagccagccgggagtttcctagtaagtgaaactgacttggttctgcttcctttcatgaaaacctttgtgaaaatgagcccaataaggggtccgaacctttataaagcacacgaccccccagagtggaccgggccctggccgactccatcagccgaagcttgagatcttggatggtctggatggtcttgaccgtgtgtgattgatgcagttaacaaagcaggaaattaacagagcttactctgagacaccagggaagtggcttgttctttcttggggttactttgagtggatgctggcacactgcttgttttcttatagatacctttctattgggctgtgtttattcaataaggaaatgcagttaacatttttttaacaagtaaaccatgggttatgaggtgttccgagtttggttaagggaaaaacaaattgacaaattagctctttcttaagtgagtattgcgaaacagtgagaaatagaatgcctgtcgtaccgtcattaaaaatttatctgggtgttgacagctttttgttaaatgtaagacattcagatcctgtccacccagcatatgaaaaaaccaaaccaaaccaaaccgaaaaacaaaatgcaacacaaaagcttctttccatttccccccaaaagcaagacaatttttcttaaactggggctttctccctaatgaattgccatgattttgttttctctaacatagtttaatatctttaagacagaacgaatatcaactctttttattttattttttgagacggagtctcactctgtcgcccagcctggagtgcagtggcacaaactccgctcaccgcaacctccacctcccaggttcaagtgattctcgtgcctcagcccccccgagtagctgtgattacaggtgtgcaccaccacgcccagctaatttttgtgtttttagtagagacagggtttcaccatgttggccaggctggtttcaaactcctgacctcaagcaatccacccccttcggcctcccaaagtggtgggattacaggtgtgagccgccgtgcctggcctccactctttttagacacctttgttgagttgttgttttgggcctgtaagtttctctggcttattaccactttcccctcctgtttctagggaagaaatgattatttagataaaaaataatttgataaaaggtagcagatgataccaaaggtaaatctttgtcttgaagagcctgaagctgtgagcattggtaaagccgtgggctgcagtgagggaagggccggcttggagccgccctcagcctagcctccgggtgttacctggagcccttgctgtcaggacggcctgtcacttctcgcccttctcctgccctgccaagcctgtcccttcctgtgttgtgacaacttttttttttaaacaagtatttctacagctccattattttgagattcttggaagaaagatactatgtaaatgaaaattaaaaataaaattctcgctggagggaatcgtatacatgtaacgtttttgatgaggtttggaaaagactttcgttctccctctggaactgggaacattctgtggctcccgtcaccatttctgtgtcactctgaaaggtgtggcagataatggtgaaacatattattttctgtttttcaccaagtagttgacccagaacttgaacccatgcagtcctgggtccagtgaattatttctgctgcatacagttctgctgtgtcctcgccgagagcgtagtcagcaaccgcccggagaataccaacctttcaaaagaaaaagggctggagtccccaacatacagagattacagctaaaattacgaccagagctgttaatcaaatcccatcttcccttcctattcacacagtagagatgttataagtcatacaggtttgagacagaaaattgagagcagaggagcatgtgtttaaaccagcatagaaacattcatttaccagaattgctttatttcagccgtatctcaactcgttgcttacacagtaacgcatgctgtctcgtcactcagccaagtgggagacaagttcaggtttctgctccatgggatccaggagcctgcagtcaccgatgagcctggaggaccacaaggtggccagggcccttggagagctgtgctgcggaatcgtaaagctaccatccggagctggccgtcccagagggaaggcttggtcatctcttcccctccacctggtcctcagccctggtcccgcagtttgtcatcccgcagtttgtcagcatcgatgtgggactgggagaggaaggatattgccagttatggttgaatgtcattgtcaggggagtaagaagtagtttgtgattgttttacgtggctctgtgttggtatataattatgctgtcatcttaaaacgccctgataccttaatgaaatctgtgtgtgtgtgtgtgtgtgtgtgtgtgtgtgtgtgtgtgtgtgtgcgcgcgcgcgcgcagttagtcttcggggctgcttattgtgtgtgagagccaagtctttctaacacacgagctgagtgcgtcgtcttttacttgtttcaaaactgcccattcgaaacaggtcgcaatccattataaatgcagctgccagattaatcttcccgaaccattgatttcatcatgccattcctctccttaaacatccatggtggcccacttaggcacagagtggagaccacatttcttagggtagcagacagagttcctgatagtcctttctgccccacctaaaccttttccatcccagctagaatgactccagaatcttgcttatttgggggagctccctcctcctccctctgtacatctgagcttcaagcctacttcagaatttttttgtttttttttgtttttgattttttgaggcagggtcttgctctgttgccggctggagtgcagtggtgagatcatagttcactgaagccttgacctcccgggctcaagcaatccttccacctcagcctcccgggtagctgggactataggcatgcaccaccacgcctggctgatttttccatttttttttttagagacagggttttgccctgttccccaggctggtcttgagctcctgggctccagtaatcctccctccttggtctcctaaagtactgggattatagaggtgaaccactgcgcccggccttcaagcctatttcatgcattcctttttcttttgcccctgtgtgcccggcagtagtgatggagacttaaaatagcagtggcttcccgcctagagggcggacaggactggcaggacgaggctgggatggatggagcagtgtgtctgagcctctgggaaggctgcaggaagggcttggaaggcgggtcggggagtgggcagggggcgcccactgagttctgtgtgcttggggaggtgtgggagacagggctttccagcagaacagtcgtggggtggccggggatctctagggctcccctctgagcttgggttccctccctctgccctgattatcccttgggtacccaccacaccatcgccacacaggcccccactctctgccttgtgtgtccgatttaggactcattcagctggttaagaatgcaaaattaattcttttttttaatatagtgaaagcaggtagattatattaaaatggctgtgttttgaaagctactgataggtacacctatggaatagatgtttctttttcagtcccattaattatctttctgtgcaaagtaacataagtgttactttttcagtcccattaattatctttctttgcaaagtaacataagtgttggttaaaatacagttgacccttgaacaacatggggattaggggctgatcccttctgctgttccccctaccccacctgcacagtcaaaaatccacgtataactttttttctcccctcccctccttctcttctcttctcttctcttctcttctcttctcttctcttctcttcttttcttttcttttcctttcccttccttttcagacggggtctcattctgtcacccaggttagagtgcagtgacataatcatagctgactgcagcctggacatccggggctcaagcagtcctcccacatcagcctcccagtagctggaactacagacactcaccagcatgcctggctaatttttaatttttttctttttttagagacagggtcttgctttgttgcccaggctggtcttgagctcctgggttcaagtaatcttcctgtcccagcctcctaaagagctgagattataggcatgagccaccaggcccacataaaacttttcattccccaaaaacttaattactaatagcctaccgctgatgggaagccttaccgataacataaacagttgcttaacatgtattttgtatgttaatatgtgtgatatactgtattcttagaatgaagtaagctaaagaaaatgttattaagaaagttgtaaggaagagagaatatatttactaatcagaatatagaatggatcatcataaaggtcctcattctctttgccttcatgttgaggagtctgaggaggaagaggaggcgttggtcttgttgtttcaaggtggtggagatggaagggctggagcaggtggagggggagtcgggagaagcaggcccaattggtataacttgttttttttttttttttttttgagatgggagttttaccctgtcacccaggctggagtgcggtggcggatctcgactcactgcaaccttcgcctcccaggttcaagtgattctcctgcctcagcctcctgagtagctgggactacaggcacccactactacacccagctaatttttatagtagagatgggtttcaccgtgttggccaggttggtctcagaattcctgacctcagatgatctgtccgcttcggcctcccaaagtgctgggatgacgggtgggagccaccatacccagccccactcaatgtcacttttattatggaaaaaaaaaaatctgcgtgtaagtggccccacacagttcaaacctgtgttgttcaagagtcagctatatgtataattgtacctgtggcacatagaacacaaaaagatccacatttttaaaaacagcattgggcagaacaattttttgacagaggtctgtttgactctgctgacagcctgagtgggaggaaacttccccatatgaacgaacggggaaagtgcatgttgtagttctcaaaacccaaaaaaatctaagagaaacccagcagcaagaaacacagaggtttgggtgtcagcatcggaggaatgtctcacgtctgccttgtcccccagaccccgtccctgtgtctgggcaaaggcacgccccgctccaggtcggccccatttcagagcagtggccctcataggctttgtgcctcttcatttagtctaagaaactacctaggatatttttgtagaggtgacatcactgtctggctgcagaagcatttgcttggatttggggaagtgagggctgggagaggagggcttagagaggcaggatgcccaggcccattgcgggtggctgatggggggtgggcttagcatctgcagggacagggtggagggagaggagccaccccaggcagggggaaggggtgtgccccctttgggatatggaggttttggggggctggtgggagggaattccaggggtcgagcccctggggaaaaggaggctttaaggtcagtggaaaagtgggtgccaaagtctggaagatgagttgaaacctggagtttgaagcccggggaggattttgttggagtgttggctggtgctggagagttttgcatcacttggggtggggtggggtgaagaattaacttgaactggcacagcacccctttgtcttgactttccctgttctggagtgaggacggcttgatgtttcagcaaaaggagtagtggagagggagaatatttgcttgtaggattgggttccacataccatatctacagttttacatccactggtgacaagacaggagcttttctatttttgttttgtatttttatgtttttgtgcactaacagtaatggtttcatgggaacagatggcggacggacacgggcttaggctcttggtttatttcatgttacttgcatgacagccctatggagctgcgtacctgccataggtgagaagccgggagttggggttacatcccggactttgctgagctccaggagtgtttttcctcccgacctgcgctgttccctagacaaccctcagccgaagcagtggggtcatcgggtgactcagaagggacctcttctcaggggccgcccaagatgagcttggctgggtctgggtcacttagcagtgagcagcaggggatggaaatggggccggggtgggtgggcttgaggggagcactttctcagggacgcctggctggagccttgccctggcaagacttcaaactcagccccgcagagaagggtcatctgatgatagaatcacggctgccccatcattcccattagcaaacttcatctgatagttggggtacggttgtggctcaggctgtaaggagcccccctgttgcattactcactatcctcagatgccccatccttgcctgaagcaagtttgttgggacagttttggggaactgttaggagagaggcctggtcatggggccggaggggcccagaggagcggcctgccctatctgtgggcggttcggtgagtgctagatggggtgtctctttacaagactttcctctgagatgctggggctatgcccctgggtgctggggagtgaattgcccgtagatactgatacctgtacttaaccctgtgacggtcaagaccagatccccactctccaagcccctgggaaactggttgatgtagcccctgcagtgataccgcactcaaatccatgcagatcccctgacatggtcggggcagcacccaccacgcaggcttctgttctgagctacatgggatgttgggcgtgtgttttctaagagactgatttcataagacatgtaccagtggccgactggcctgaaacagcctggtcacagcgacatccctgagatcttagcttcttttcctcggggaattatcattggactggaaaactgaggttttgggccactctggattcagatgcttttgttgttgttgttttgagacagggtcttgatctgttgtggactgcagtggtgggatcatagctctctgcaaccgcgaactcccaggctcaagtgatcctcctgcctcagcctcctttgtagctgggaccacaggtgtgccccaccatgcctggctaattttttttacatatttttatacaaacagggtcttagtatgttggccaggctggtctcaaactcctaggctcaagtgatcctcctgcctcagcctcccaaagtgccgggattatataagcgtgagccaccacgcctggcccagataactcttgcctgcctgatttttttataatgatgcactttgttttgttaaaaatttataaatttaaagacaaaatatgcaaaaatgtgccctggtctcagaaataacacagcacattcgagtgaagttgttggcagttccgtgtgttttggggtgattcatttttttcataggttgttggggccgtgcatccattcgtgttctgagcacactccatggtacctgatgactcgaatggatcctgttcaagcccctgggttacccaaagaaatatacttctggcctgctggttggtcagagaatgcaggacacattggggtatcgcgaggtgtccaatggcagcgggttgggtgtgtctgctgtgtgaacagggcaggggtttgggaagatggactctggctgtcttgctccaaagacttccttaggctgttgttgagcatttattgagtgtctcctgtgtgccgggcagcattctagcatagggattgagtgaccagacagtagggaatccttgcccttaaggaactgacattcttttttttttttcgagatggagtcttgctttgtcgtccaggctaaagtgcagtggtgcaatctcggctcactgcaacctctgcttcctgggttcaagtgattctcctgtctcagcctcctgaatggttgggattacaggtgtgcaccaccacgccgggctaattttctgtatttttagtagaggcggggttttgccatgttggcctggctggtctcgaactcctgacctcaggtgatccacccacgtcagcctcccaaagtgctgggattacagccgtgagccaccatgcctggccggaactgacattcttgcaagggggatggaagacaaaggcaaggaataagtgagtgcccagtggcctgggaacagacggagcaggactgatacacaaagccccacagagtcacttctgtcttctgaaggccctgagaaataactttattattattattattattatttagagacagagtctcgctctgtcgcccaggctccagtacagtggtgtgattatagctcactgcagctttgacctcccgggctcaagctatcctcccacctcaggttcccgagtagctggaattacaggcatgcgccaccatgccaggctaacttttttgtattttttgtagagatgggggggtctcactgtgttgcccaggctggtcttgaactcctggcctcaggcgatcctcctgccttagcctccgaaagtgctgggattccaggcctgagctgccatgcctagccccgatttttaaactgaagagggatggttcagttgttggggtgtgtcttagaggatccttctggaagccccacatggaaggcgggctagagtgaggagggaggggtgataatggaaccaggagggtgtggtggtcatggcccagtgagaggatgccaggctgtggccgtgccagactcagtgtgcctggccctggcatttcaggcagggaccactgaggggtgatgggagagatggggctgggtgagtggcatttccacaggcatccagaggggtgcgaaaaactgaggttggggaacagcaggggcagggaacagcctgtggagggtgtggtcatcagtgtcccccaccgacatggcacatccagcgagcccactgtgtccccagcacctgcggtgcagggggctggcaccttcaggggcgggcttcgtgcagacgtccacccagtcagtccccacaggtttatcaaacacaagtggggcgacaggacccacacttcggcgttggacgtgactcacgcggggagttggcttggagttcctttattcatccctatttgctttctgtctgtaatcctttgtaattccctggtttcatgatgtaattctaatggaaataaacccgaacctttcaaaattatgtaattaattgcattcagcttcaatgacaatgactaattatagtgatacctggtggcaaggcaggtacctactgctggggggctcctgtctgcttggtactaggactgccacttctgggcgcgtcggagcggctgcacagggggtcagctggctgtcctgtggcctgctccggtgcctctggtccccatcttaccaggagcagcgccatggccatgcagggaggggccggagagggaggtggtgtgcagggaggagctgcttaggggtgggagggcttggacttgtctgcaggttaaagagaagtcttgctgggaaagtaacttcggggctggttccctgagagcattcttatctgattcatgtattttcctgagaaaaagggaggagggtgcgttcgactgaacgtgaagcgttcaaggatcggaaaggcaagccaggtacagtggcttacacctgtaataccaacactttgggaggctgaggcaggaggatcacttgagagcccaggagttcaagaccagcctgggcagcacagtgagaccccatctctacagaaaaaaaaaaagaaaagaaaagaaattagcccagcatggtggctcacacctgtgataccaatactttaggaggtcaaggcggaaggattgcttgagcccagttgttcaagaccagcatgggcaacagtgagaccctgtctctacagaaaaaaaaaaaagaaagaaattagctgagcgtgatggtgcacacctgtgatcctggctgctcaggaggctgaggcaggaggatcgcttgagcccaggagttggaagctgcagtgacgtatgacagtgccattccactccagcctgggtgacagagcaagaggaagactctgtctcttaaaaaaaaaaaaaaaaaaaaaaaagaatccaaaagcaagcttatggagaagggagaaagtgcgacagtcacctcggggcgtgggagagcagaagatggatgtcaggttaaaaaccattactgtgctgtagtatttccaggaggccaagtccagggctctgggacctgtacactgcggcatcagaccctaaaacagagctctcaggttttcgccttcccaggaagtctgcatcctttttgcagactggttttattctgtgttaggaggaggcgattttgctaagaaatcttcactgcaattttcccccccaaatcagggcacttggcatctccttctaacggggggtgcagagtctgtcctagaatgggacgcacagtgttcacacgagtaccgagtaggtggggtgctgggccggcccctctgatcctgtcctaccctgtgcagccacgtgcctttccttatccccagacttctgttgtcacgattcttccagggaagaatctggaagtggaatccacagggcggtgcccagggatggcctttagtgcctagtgttctgtttcagagagaggcctcttatttatttgaaaagctgattgtttcttttttttttttttttttttttttttgagatggagtctccctctgttgcccaggctggagtgcagtggcactatctcagcccactgcaacctccgcctcctgggttcaagcgattctcccgcctcagcctcccgagtagctgggactacagacacccgccaccacgcccagctaatttttgtatttttagtagagatggggtttcgccatgttgcccaggctggtctggaactcctgacctcaggtgatctacctgccttggcctcccaaatgctgggattacaggcatgagccaccacgcccagccttattttctatttttaaagaaagagcaagactgaaaacatttgcatgcacagtgagttttaaaaagttcctttttttagagaggaccaagaaggtgcagagtactcttgaaaagaaattttttttctgttctaaacgtgccgcttgttgccctggtgcagagagcagttcttttgatacaatacctccgtcccgtaacttttttttaaagctaaaattcatataatgtaacatttacctttccaaagtttaaaattctggccaggcctgtaatcccagcactttgggatgctgaagcgggcagaccacttgaagccagaagtttgagatcagcctggccaacatggcaaaaccctgtccctactaaaaatacaaaaattagccaggtgtggtgagcgcttgtaatcccagctactcaggaggctgaggcaggagaatctcttgaacccgggaggcagaggttgcggtgagccaagatctcgccactgcactccagcctgggtgacagagcgagactctgtgtcataaataaataaataaataaataaataaataaataaagtttaaaatccataggtgtttggtatactcacaatgtcgtgcagccatcaccacgatctagttccaaaacgtttccaacaccccgacaagaaactcccatacctgtcagcagttaccatttgtcctccctcctgtacccccggcaccccgtaaccattcatctattctctgcatctattctctgcctccatgcgtctcgggaatcatggattacgtgaccttcgtgctgtggcttctctcacgtagcacagtgtttgcggggctcacccacattgactcatgcacctgtctgggccgcattcttttttatggctgaataatattccctggtatgggcataccaggttttgtgtatcctttcatcagctagtaaacattcgagctgtttccacttttttggccattgtgaataacgctgctgtgaacattcgtgtacaaatgtttgtatgaatgcagttttccattttcttaggtgcaattgccaggtcatatgtagtcactctgggctttgctttttgagtctgttgtattttatttatttatttttttatttttgtgggtgcgtatatttatggggtacatgagatgttttgatacaggcatgcaattcataataatcacattgtggagaatggggtatccatccatcacagatttattctttgtgttgccaacagtccaattatacacttttagttattttatttgtttgtttattttgagttggagtttcactgttgttgcccaggctggagtgcaatggcgcgatcttggctcactgcaatctccatctcccgggttcaagcgattctcctgcctcagcctcctgagtagctgggactacagctgccatgcctggctaatttttgtatttttagtagagacgaggtttcaccatgttggccaagctggtctcgaattcctgacctcaggtgacccacccacctggcctcccaaagtgctgggattacaggcgcgagccaccgcgcccagttgcttttagttactttaaaatgtacgattaaattatgatcgactatagtcaccctgttgtgctgtcaaatactaggccttattcattgattctatttttttgtagccattagccgtcgctacctccctgcattgttgcattttggcctcttatgtgtaagtcccgtttgttctccagaatgctgcttttaacacccagcccgttccatctctctctcttctgccttgggtgtcatgctgtctcttcctcagatttctcctggggtgcaggtgctcccctgcgaaccactgctgtgcacaaagtgattttgtgctcaggcaggtggatcgcttgagcccaggagtttgaaaccaccctgggcaatacagtgagaccccatctctacaaaaaaaatggctgttgtgcagtttgggatgagagttggttgcccccgcggtcctcccttcccccaaccccacctgccctccttgctcagcaacaagggacccccttcactggactatgaagcctgagggttgtctaaatcaatccttggccaggcgcagtggctcatgcctgtaatcccaacactttgggaggccaaggcgggtgcatcacctgaggtcaggagttcgagaccagcctggccaaggctctgagagcagcgagactccttctcaaaaaaaaaaaaaaaaaaaaaagaatcctggctgttccttccccacggccagtgggcattacactttgttttggctggagaaaccgggagtgcccgttgtctgcctggagacatgcctgtgggagaagaggctgcccccacctgctaccatcatcccagcatgggtgcggtggggggcaggggagacagagtaaaaatcgcagaggacatggggcagaaagatggaaggaacctgggccctcgatggctctgagtgagtcagtcctgcagtgccccgtccccatttttctgtggcctgggaaagtcaaatttcctcatcctttgtagttggccattgtgttatttggagatggaagagcattctgaaacaagccactataatgaaaatccaggtcgtagcaacttgccgtgcacggctttggcttggcatggacttacagtgacatctttgagatgcacttgtccggggtgcaggtatatttgagagtgtgaggaggacatatgtcctctaagctctgttttctaaaggcagcagaattccatttgccaagccagatgtccctcaatacgttagatcccaccaataaaacattaagcaattacaatggttaatattcactaaagtataattagaagctggcgtaaattgtgaatgaaattggcgggttccatacgttacagtgaaataccaaatctttttttagttgtgtatgtgtatctcagtgagtctgtcaactcagatgagtgaatcttacctcctctgtggatagaaacgagctcaatttcaactcagttcactataattttaaatgtttaagaacatcttgccagttgttctatcatgttaaagttactgaaatctggctgggtggagtggctcatgcctgtaatcccaggactttgggaggctgaggcgggtggattgcttgagcccaggagttcaagaccagcctgggcaacatagtgagaccctctctacaaaaaaaatccaaaagtagctgggcatcatggtgacgcacacctgtgttcccagctactcaggaggctgaggtgggaggatcacttgaagccgggaggtcgaaggtgcagggagccatgatcgtgacactgcattccagcctgggtgacagaacgagaccctgtcaaaaaaaaaaaaaaaaaaaaaaaaaaaaaaggataccaaaattctcaagtcaaattataagggttttaacattcccatttctacaccacgtgcaagaaaaacaaaatccttgttttctgcctgcctttatggtccgttctcattttcagccccctttcctcattctactctattaattatgcctttatatggatgcaaacttgtaaaatatgtggcctattttgtgtgtatacgtggttttaattcataagtgtggcactgtgccctaaatctttttctccttccttttcactcgtcacatttttttttttttttaaatgacacagagtctcgctctgtcgcccaggctggagtgcagtggcacaatctcggctcactgcaacctacgcctcctggatttaagtgattctcttgccccagcctcctgagtagctgggactacaggcgcctgccaccatgcccggctaatttttatatgtttagtagagacgggctttcaccatgttggctaggctggtcttgaactcctgatctcaggtgatcaacccacctcagcctcccaaagtgctgggattacaggcgtgagccacctcacctgggctcactcaccacaatttttgagatcttgttgtctatgtcattccctgtgaattttgtttgttatgacagccgtattgaaatccatcttcagggccaggcgcggtagctcacgcctgttatcccagcaccttgggaggccgaggtgggtggatcacctgagatcaggagttcaagaccagcctgaccaacatggtgaaacccccgtctctactaaaatacaaaaaattagcagggcttggtggcgcatgcctgtagtcctagttacttggaaggctgagacaggagaatcgcttgaacctgggaggtagaggttgcagtgagccgagattgtgccattgcactccagctttggcaacaaaagtaaaacgctgtctcaaaaaaaaaaaatccaccttcagaattgacctgtgttaatctgtccagactgccgtaacagaataccatagatggggtggcttcacatatttacacaacacatatttatctctcatagttctggaggctggaaagtccatgatccgggtacgggccaacgtggttcctggtgcgggcccttttcctggcttgcagatggcctcgtttttgctgtgttgccacatagcagagagtgtgcgcaggcaggcaagccagctctctggtatctcttgttttaagtacactaatcccatcatgagggctttaccctagtgacctcatctcatccttacgaccttccaaaggccacacctccaagtaccatcatattggaggctggggcttcaatgtatgaatttgaggggggtggacaacacagttcagtccgtagcagcaccctagctcacacgtccatttccctggggctggtcaccctcggtggtatctgacccccctcccccaagcccctccatgcacagcactgctaggaacgttcttacacacgtcccttaccagtatccaggaaaagccttgctggatccagccagatagtggtccttctttcacgaagcacctccagatcgcttcccagcgtggctgccccacttactcccccacccacagtcgtgagagtttctttcccccacaatctcatccgtgctttgtggagatattttttgccagtgagatggttttaaagtggtacttcagtgttgtgtcattttctctgatcaccagggaagtcgatctttgcgataagcctcattttatacttgtcagcttttcagatttcgccttttgtaaattgtctggtcatatattttgtcctctttttttttttctaaatggtttaccatctttttgttgatttgcaagagctccttgtatgtttcacatgcgaataatttgtcaattttctttcttttttttgttttttgagacagagtttgctcttgttgcccaggctggagtacaatggcgcggtcttggctcacttcagcctctgccacctgggttcaagcgattctcctggctcagcctccccagtagctgggattacaggcatgcgccaccacacctggctaatttttgtatttttagtacagatggggtttcaccatgttggtcaggctgatctcaaactcctgacctcaggtgatccgtctgcctcggcctctcaaagtgctgggattagaggcgtaagccaccacgctggccgttatagttttttaaattaaaaaaatttaaaattctaatagattattgtggtatagaggaaacaattggtttttgttgatttcgaagctgggaagcttgctgttaatatttttactaattaacttgattctgttgcattttctctggaaataatatatgcaaaataatgcaagtttttatttgttcctttccttctgattcttacagtggagtgacttgctggctagaatctgaagtactcaattacatggtggtggtgatagaggctgcccttttctttctctttctaccaaaggagatttttggtagaaggtttaaccaggtgaaggaactaccttaactcccctttccatagtttttagagaattttttttggtataaataggcgttatcctcttgcaaatacttttccttaaaacctattcatgtccatgcagtttttatcctttagtttatgaatgtggtaaattacattgattgactatatgatgttgaatcatttattgctttctgggataaactcttcttcctcttgtattttaaaaatattgttggatttgatatacagttttcaaatctgtgttattaagtgaaattggcctataattttcttattcagttggaattgaggtttactagtctcatgaaatgggtaaacattgtgttggaacaatttatataacatgaggattatctgtatcttaaaatttgatagctcacctttgaaaccatcagggcctgagactttagaatggtggctgggaggcatttaacatttcactttttttgtttttggtctattgaggttttctattctttattttattttattattattattatttttttttgagacggagtcttgctctatcgcccaggctggagtgcagtggcgcgatctcagctcactgcaacctctgcctcccgggttcacaccattttcctgccttagcctctcgagtagctgggactacaggtgcccgccaccacgcctggctaattttttgtatttttaatagagacggggtttcaccgtgttaggcaggatggtctcgatctcctgactttgtgatccgcccgcctcggcctcccaaagtgctgggattacaggcgtgagccaccacgcccggcaggttttctattcttatgccaattttggcattttataattttctaaaaatgttttcattttatcttggttttaaaacttaactgttctgtgatcatagtattttttttttgtaaatctgttttgaactctagctgtctcccatttctacattctgtatttctgaatttatttacaactcttctctttatttttagttgtacatagaggtttgtttatcttactgatcttgaaaaaacagcttttggtcttgttaatcttgccttttttttatgtggcttatttctcaccattattttactttctgagtgcattttttttctaacttatttttttgaatactcagctttttatttcattttatttatttatttatttatttatttttgagacagcctcactctgtcacccaggctggaaggcagtggtgtgatcttggctcactgcagcctctgcctcccgggttcaagtgatcctcccacctcagtctcctgagtagctgggagtataggcgtccctgccaccacgcccagctgagttttgtatttttagtagagacagggtttcaccttgttggacaggctggtcttgaactcctgaccttgcatgagccacccacctcagcctcccaaagtgctgggattacaggcatgagccaccactcctggccttgaatactcagctttttaaattggggttctttcttgttttggataaatctattcaaaactgtaacatttctgctaagtattattttagctgtgttccacaaattttgacatgtagtgctttcatttttattcattttgtaattttctattcattttgtaatttcccttataattttctctttaacctaagggttatttaatactgtatattttttagatttttgacacttttctttaatggcttttaaaaatgttgttgctgtcatttttatcacatatggtcagagaacatagttcacataatcctggttctttggaatctatgaggtcttctttttggtgtcttgcacatggtggatttttgtgaattttccatatgtgctcaaaaagaatgtgttttttgagtagaaaaaaacgttatatatgcagtatacaagtgacatataccatatagtcatacagtttgtttggtatatggaatacattcatgtcactgtttctttgataattttcttcccatagttttttttcttctttctttctttgagacagagtctcgctgcatcacccaggctggcacgcagtggcgtgatctctgctcactgcaacctctgcctcccaggatcaagcaattcttgtgcctcagcctcccaagaagcgagaattacaggagcacatcaccatgcccagctaattttcctagttttagtagactgggtttcattatgttgctcaggctggtctttaactcccggactcaagtgatcctcttgcctcagcctcccaaagtgttgggattacaggtgtgagccaccatgctgggccttcctacagtttttgacagttgttacattatattaggttaaggctgtactgttacattgcatgtatgatcatgatcatgatctttagattttcctgatgtattggttttttttttttgatgtctgtatagactcttattatgtttttcatgttaaattctattcgttttgacattaaaattattctattttttttttttttttttgagacagagtctctctctgtcgcccaggctggagtgcagtggcgcgatctcggctcactccacctcccgggttcacaccattctcctgcctcagcctcctgagtagctgggactacaggcgcccaccaccacacccagctaattttttgtattttttagtacagacggagtttcaccgtgttagccaggatggtctcgatctcctgacctcatgatccgcccatctcagcctcccaaagtgctgggattacaggcgtgagccaccgtgcctggcctattctcctattttttttgtttgtttttggtttccatttgtttgatgttgctttttctctttaattatttccaatccatatcattttgctttcattgcatttgttgcagatctgtgatgtaagatcttgtttttaaaacccaggttgagaatctttgataagtgaatttagctgagacacatttctggtagttgtgttatattaggatttctgccatcttattttgtgttttctgcttaccattacttatttttaaaaaagcttttcttgtaatgctttgtagggttgaactttcttctgctggattttaaagttgtgcaatctattttattcttctagagctcagaattgtgattattcttaaaattattaagagccacttatgtgattagtttttcctatccatttcttttttttttcttttagaatataattgatttttaaattcacttacttgtttcaactgcctggagtagggattcctgtcagtttctaaaggctattaatatctttgtctttctgtcaaacaagttaagtgatagggacctcgtttcctcccttcagcctgttgagatcgtttagattctaggataatggtgccatataggactgtggccctcgggtgtgcagaatcagcgtcaccaggtattagactttcagtattaatgttctctccttgctagaatatgtgaacaaatgtgaaccttttgaaagagccaatccttcaggatggatccagaatggctaaccaggcctaaatctaaaatagagccagacggccatttgcagattggaagtcacacacttagtctgagttccctgaaaacctgcacctttcttaagtttgggactttcagagctcacctgacccaactagtctgagttcaccagccctggccaatcagggctcagctgtgtcaaccaatcagccctaagcacgtttgaatcattcataaagaaatctgactgggaacctgggtgggcactgttgctattaacaaacaccgtccccctccccgcccccgcccccgcccccaaccccagcagcttctgtttacacggaaggctgcatctccctggtttgcacgttgtccacgggaataaagtctctttcctccagattccttttcagagcacttttgttaagtattttaaatgatagtgcatttaaagaagtctttctgtgataaacttcctgagactttaaagtctgagtctatacttattccaccctcatatttaagtgatacattagctggatgtaaaattgtaggtcaaaattctttttcttcaacacccagattattcccctgttttctttttgcacagagagtcacggttgagaaatatgaggacagtgtgattcttactgctttggagggaagtctggtttttctttttatccctgtcttcattcttttttctttttatccttgtcatcgttcttcttttttctttttgtttttccgagacagtctctctctctgtcgcccaggctggagtgcagcagcacgatcttggctcactgcaacctccgcctcccgggttcaagtgattcttgtgcctcagccttttgagtagctgggattacaggcgcctgcccccatgcccggctaatttttgtatttttagtagagacagggtttcaccacgttggccaggctggtctcgaactcctgacctcaagttatccacccactttggcctcccaaagtgctgggattacaggcgtgagccactgcgcctggcctgtctttattctttaatgtcaccaaaatgtatctaaataatgatttcttccacctacctatcttatttggcactttactgaccctttgattctgatgtcttatttttttcttttattctagggagttctcatacatttatctctccaaatattttctctcctctctttattttttcttctttctaggacacccactgtacaggtgtcaacccttcttctgttgtccatctctctctctctctctttttgaaatggagatggggtctcactatgttgcccactctggtctcaaactcctgggctcaagcagtcctcctgcctcagccttccataatgctggaattacatgtgcgagcccccatgcctgacctgttctctgtatctcttaacattagcctcattctcaaacatgaagagagtagccttggtgtagactggccacgaattggcgattgttgagatgggcgattggtagtgagggtacccatgaattggcgattgttgagacaggcgatgggtggtgaggtactgtttgtatgtatttgaaatactgtctgtgtatagctccagttgaattacctcctactgagacccactggccttagcctgtggtgtggggatgaaagtggggagggaatagaggaggaggctggctagataggcttggggctggctgccaggacagttaacatgacttacatggcacatcgtacatttctatggaacagtgctgttccgatttagccccttgctaggcaaagtgattcatgaaccagcaacagtggtatcacctgggagctcgttagaaatgcaggatctggccgagcacagaggcttatgcctataatccccgcactttgggaggctgaggccggaggaccacttgagttcaagaccagcctggccaacgtggtaaaaccccatctctactaaaaatacaaaattagccagatgcagtggcacatgcatgtaatcccagctacttgggaggctgaggcaggggaatcgcttgaccccaggagtcggagatttcagtgagccgagattgcaccactgcactccagcctgggtgacaaagggagactccatctaaaaaaaaaaaagaaaaaatgcaggctctcaggccccaccccaggcctcctgagacagaatctgcatttttatgagattgtcaggtgaatcatatgcacatgaatgtttgcacattaaatgagcactggtctggatcctttaaaaaggaatgattggttttatttaattcatattttaatagagtgactcctcccttatcttccaagttgagctctcccagcatagatggcccagctgccagggctgatgcccatagtctgtgcataaacaggggagttcccgagcccttttccaagccgcttttaaatgcaactcctttttttttttttgagataggctgttgctccattgcccaggcaggagtgcagtggtgcaatcctagctcactgcagcctcgacctcctgggatcaagcgatcctcccaccacagcctcccacctaagccccctgagtagctgggactacaggtgtgtgccaccacacccagctgattttattttttgtattttttgtaaaggcgatgttgttcaggctggtcttgaactctttggcctcagcgattctcccacctcagcttcccaaagtgctaggattgccagcgggagccaccctacccagccgaactcctttcttacacgtagttctgacagtatcgatcatccactcttcaaggtgctaatacattaaaacagcaaattggaagtaggccaaggaggtgctagtggcagccccacggacagtagcaattaagaccagttgctagcttgatagtgggagaccagaaagactaaaaataattgcaggctgtgttggtctggtatggatgctgacttcctgacatgtagctaggtggagtggctcatgctgtaatcccagcactttgggaatccaaagtgagacgataacttgaggccaggaattcaagagcagcctgggcaacatagcaagaccctgtctctacaaaaaaatttaaaaaattaaaaaaaattagctgacatggtggcacgcacctgtaagtctcagctactgaggaggccgagatgggaggatcgctggagcccaggagttcgcggctgcagcaagctgtcattctaccactgcactctaggttgggcaacagagcaaggtcctatccctaaagaaatgacaaaataaacagtcaaccacctggtggagaaggtagtattttcaccaacgctgtagcaaatgtcaaggccaagacaaacacttgtttggaaaatttagttttggggaaactcctctcctctagtgtgctggattcatgatatattgttacctggaaatggcagccctcagtggataagaacctggggttttggagatgacccatgtttggcggcacctgatccctatcagcagccatgcgtcccactgtctaggcagtggccaagggtgctctgtcttggacggcagacagcacatctgatttggaatttttgttccagcacttcttagctgtgtgactttgggcactgctgaacctgcttcctccgtgaaacagccagtgataaaactatttactgtgtagaggattctgtgagactcaacgtatggcagtgcctgatgtactattctaaatttatttttatttttattttagagatggggtcttgctgtgttgcccaggctggtcttgaacccctggcctcaggtgatcctctggcctcagcctcccaaagtgctttttcattttctcctcaaaatgagaaagtaaagtgttatggtgttggcagctcacccatagaaactgctttaaaggccaggcatggtggctcatgcctgtaatcccagcactttgggaggccaaggcaggcagatcacctgagatcaggagttcaagaccagcctggccaacgtggtgaaacccatctctacaaaaataagctgggcatgatggcgggtgcctgtaatcccagctactcaggaggctgaggcgggagaatcacttgaacccgggagccagaggttgcagtgagccaagatcacgccattgcactccagcctgggcaacagagcaagactcaaaaaaaaaaaaaaaaaaaaaaaagaaaagaaaaaataaactgctttatattaaaagaaaaataatggtcataatctggccttaggggctatagcatcaatggtgaggcctagatcgcccaggtcactgggtgtgtattgacgttgtttacatgttttatttcttttatgctttttcccagagattgatttttttttctcccttatgtgattcaaaatatctgcttacacgttaaacccagctcagttggcataatgtctttttaaggcacaagccagcttcctgggtgtgagcagcttccacatcaaatgttcagtgggcaaatgaaacatgtgagtcacacaacacttggcacctctgtggcttttaatatttggtggcaaacttcctaccgcgaggagaaaattttcaaagtggaagtcctttcagatccagatggcaaaagaatttgttgggcgagggatcttgattcttaatgttgaggggactaggaatgtttgaattttctcccccttgtattttcccagcctggtaggcctccatgggggccaaatttagttgcgaatttgcccacttttgtgcagagtgaggctccatctatggaatgtgcttaaccataaggatcagaaaaatttctagtagctttgttaagtgcacagcaaacagaagacaaagtgtggccgggtgcggtggtttatgcctgtagtgcaagcacttagggaggcagagatgggaggattgttgagcccaggatttcaagacccagcctgggcaacatagcaagacccccttctccaggaaacggaaaaaaaaaaagagtttgaaaaaagtgtgtagactaactgaacacttgcaaggcaattttttttttttttgactgtctggagagcttgggttccatgaacacaatacagctcttgttccacgtgacttacaagttgggccccgggttttgttttcttggccgagatcttgaagactgtctccaagtaggtgtttcttccttggcagcaggtttggccagttatgtagtcagccctgtccttctctgaagggtgggtagttgagttgggggtatgagaggggtgacagtggatcatcttagctttttttctatttcacgtcattgttcatggatacaagtgcaggtttgtgacataggtaaacttttgtcatgggggtttgttgtacagattacgtcatcacccaggtattaagcccagtatccattagtttttttttttttttagttatttctcctgatcctctccctctttccacccttcactctccaaaaggccccagtgtgtttttcccccctctctgtgtccatgtgttctcattgtttagctcccacttataagtgagaacatgcagtatttggttttctattcctgagttagtttgcaaaggataatggcctccagctccatccatgtccctgcaaaggacgtgacctctttcttttttctggctgcatagtattctgtggtgtgtatgcgccatgttttctttatccagtccattattgatgggcatttacattgattctatgtctttgctattgtgaatagtgctgcagtgaacatacatatgcatttatctttatgatagaatgattgatattcttctgggcctatactcagtcatgagattgctggatcgaatggtatttctgtcttcaggtctttgaggaatcatcacactgtcttctataatggctgaactaatttacactcccaccaaccgtgtatataagtgttcccttttctccacaaccttgccagcatctgttactttttgactttttaataatagctattctgaccggtatgagacagtatctcattgtctcatgcaattttttttttttttttttttttttttgacagggtctcactctgtcgcccaggctggagtgcagtggcgcgatctagatcttggctcactgcaacctccgcttctgggttcaagctattcttctgcctcagcatccctagtagctgggattataggaatgtgccaccatgcttgtctaatttttgtatttttagtagagatggggtttcaccatcttggccaggctggtctcaaactcctgacctcaggtgatccgcctgccttggcctcccaaagtgctgggattacaagtgtgagccaccatgcctggtttatttcattttaaaatgcaatttttctgaaggtagtcattgtttttgcatgttttcttttcttcaaaacatttttcatttgttaatcaacattttataaggcttaatattaaaaaagaaccaaccccaccccacttctccccactctcatttcctacacccaagagcagccctggttttctttttctttctttctttcttttttttttttttttttttgagacagggtctctctttgttgtccaggctggaattgccgtggtgcgatcatggctcgctgcagccttgaccaggtataggaaatgagagcactgtgcccggctaattgttgtattttttgtagagatggcatctcaccatgttacccaggtggtctcgaactcctgggctcaagcaatcctcccgcctccgcctcccaaaaagctgggattacaggcatgagccattgtgcccagccagcccctggttttctaagtagcaggcttataccacttgtctttgatatttcagtgttaggtgttgacttactgatgtgttttatgagacatggatgaggattctggcctcagaaaaggctgcctacgcctctctctttctcagaatagtcacatttcacctgtaattccagtgctttggaaggccgagacaaaaggatcaccggaggccaggagctcttgactagcctcggcaacattgcaaaactctgtctctaccaaaataattaaaaataaaaaaattatccaggtgtggtggtgtgcacctgtaagtcccagctacatgggtagctggggtgggaggattgcttaagctggggaggtcaaggatgcagtgagctatgaccacacccctgtactccagcctgggtgacagagcgagagtctgtctcttagaaaataacaaataaatacatttttaaaagcatagtcatacttctctttttggctcaatcaattttcaaatatacagtgtttccatagctatgactttgtaaatattagtattctttgtacactacttaatgtatgcctaaactctcctccagcaacatagatctcttaaaatatggaaggccatcagtgaggtagggtttcatctttcttggtgacagcccttcttggcccccctattctgcccagctgggtctcccattcctcatcatctcgggggcttcctcccatctctctccagctttggatctcctgactcgtgtacgccatggctttgttcttcctggttaacctctcatttgctgcggggatgttctccgattgcttcctgatagatggtgaccatatctgcgatccgacaagatcttctttattctgtcctcaaatcccaggttggaaaacacttcctgcagaatgggaaagatttggctccccgttttctagcatccgtcaagggcgttctgcatttttgtcctttgttctaacaccttgtagagttgtctttttcttcttcttctcagatttcatgaacacgcaccttggcgtggttcttatggcctggtctctgttttctgtcttccagagttgcgttagtcagatgttgcactttgtggcctgatctgctaatttttcttacttttcatttgtctttcttctctcttttttttttttcttttgagacagcgtctcactctgtcacccaggccagagtgtggtggcaccatcatggctctctgcaacctccactgcttgggctcaagggatcctcctgcctcagcctccccagtagctaggactacaggtgcacaccaccacgcctggctaattttttaagtattttatagagatagggtctcactatgttgcccggactggccttgaactcctggtctcaagcagtcctcccaccttggcctcccaaagtgctgtgattacaggcgtgagccaccgcacccagccttacctttcactttcatgcctctgtcttttttgatgtgttttctgcaggaatttctcaaccttccagtctttctaaacttttatgcatcttattttagatttccaagttttcttattctttgaacatttttatggtctgttctttcatggaagcatcatcttttatattcctggctacattcatcacagttttttaaaaagtttttggccaggcaaggtggctcatgcctgtaatcccagcactttgggaggccaaggtgggctgattgcttgagcccaggagtttgagaccaacctgggcaacatggcaaaaccctgtctctactaaaaagacaacaattagctgggcatcgtggcacacacctgtagtcccagctacttgggtagccgaggtgggaggatggcttgaacactgaaggtggaggttgcagtgagccgagatcacaccactgtactccagcctgggcgacagagcaagaacctgttgcaacaaataaaaaaattttaaaaaagttttcttctgttctctgcgttggaattttttttttttttttttttttttttgagatgaggtttcactcttgttgcccatgctggagtgcaatggagtgatcttggttcactgcaacctccacctcctgggttcaagcatttctcctgtctctgcctcccaagtagctgggattataggcacatgccaccatgcctggctagttttttgtatttttagtagggacagggtttcatcatgttgcccaggctggtcttgaactcctgacctcaggtgatccacctgcctcgtcctcccaaagtgctgggattacaggcatgagccactgtgcttggcctctgcattgaattcttactgtctttactttgtaaaatgttttttaaaaatatataaacagttgcataccatgcattttggttgcaaaatataatacagtgaacacccaggaaccctccacccaaccctaagaatcagagctttgccagtcaattgcatccacctgtatattcctcccacctcctattccctgccccctctctgggacaggtgacccatcctaagtagtgtatttattatgctcttgcctaaaataatgtattttctgcacccatgaatagatgcttaagtagtatatgattactcttccctgagtttgagctctataaaaatggtattattctgcaatagacttgcaggatttgccttttgaacttgagttactgcaacattatctgtgaggttgtctgttataactgtggtccatttattttctctgatgcttaaacccagttgtgcggctagacccaaatttctttagcctttgtcctgtcgctttgtctgttttcctcgtttccctctttgttttggtcccagttagaggtttcctcaaatgcctagtgacgtgttgttgtttgttcatatatcagagcatggcaatagaaagggtgtgtgtgtgtgtgtgtgtgtgtgtgtgtgtgtgtgtcggggtaaagagcagttttggtggcccccaccgtaagtaattaacccaggtgtctagttgcggggagcccccaggcatgggtatcagtggctcattctcttggactggtcagtttctctagcaaggagccctcagtgttcctgctgggtggtgcagttgggaactgttagtctgaccacctgtcttctaggcaccaggctggggcatgtgctgggatattcactcagccccctgcccatggtcatgagaaaccccagtcttctgcccacagtgcaggagggacctgaccgcagtggcattttgcacacctgcccggcctccaagtcctgcagctcgaatgagcttgcttgctgcaggcggcctgctccatcttgaggcttgtctggaaaggcggcttcggctttccagtgctttccagcgctttccagcttctgagattttgggggcttttcatttgttcttgctttcctgtcctctttgtcaggtgagtttatacctttctgttccaaagcaaacaggatcgtctgccatgttgaactggatgtcggacaattctgaaatgtgtgcatggggcaaggctgtgtgtgatgataccagtttcataggaaacacttcggttttggttttgtctttcaaagtcatcttttgtgagcgccttctagccgggctgccagcgggtaacatatgattaacacaagtttggagtctgtctgcagagcaactttatgaaatgctcagaaagccagtctcctaagcataggagcctgtttggtggtgatgggatgaggaagcagtgggggctttggcaccagaggcctgggctcaaatcctgcctccatcatttaggggttgggcatctccattcccttatctctgggtggcgagaacttcctaagttcttagtgtttggaagggaccccctccataaagtgaggtgcctcttggccactgctcagccagtgggggctgttcctaacagttgcctcctccgattgctggagtaagaaatgacaccctgtctcccatttctgtggcaccccattctcaacagtgatggttctgcctgtttttagtcacacacacctgcacacttcaaaggactaaaaatggactcagttttctttctttttttttctttttgagatgaagtctcactctatcacccaggctggagtgcagtggcatcatcttggctcactgcaacctccgcctcctgggttcaagcgattcttgtgcctcagcctcccaagtagctgggactacaggcatgtgccaccacacccagctaattttgtatttttagtagaggtggggtttcaccaggctggtctcaaactcctgacctcaagtgatcctcccacctcagcctcccgaagtgctgggatgacaggtgtgagccacctcgcccggcctggactcaatttggattgcaatgccccacaatggtgacctccctcttctctgttaatgcatcctcttccctcttgcttaaaaatttccccagtgccgtggcatcttacctcctgctgaagtgtgtgctgatgctttgctgggggctggaccccgtcccttggagcctggcccaggccctgcctcccagtgaaaccctggccgcctttccaacctcagaggctctatctcctcccaaaccctgtagcccttccagttgctggtcactgacttccattaattggcccggtggccttgcctgccagggggaccatgaggtgaggggccgtgtcctccgagtggtctctttctccagggtgctggggacccaagaaatgcctggtcgtttctcataggttgataaggaaaatgaggcctaggtagggacaggcaggatttcacctgaatttacaagatgatgcaatggaagagtcttcagtatattttcacgtattttagaattgagttacaacattcattttggtactttctctgtgttctccccatgtgttaaaaagcagcttaaggccgggcgcggtggctcatgcctgtaatcccagcactttgggaggtcaaggcgggtggatcacgaggtcaggaattccagaccagcctggccaacatggtgaaaccccgtctctactaaaaatacaaaaattagctgggcgcagtggcagacgcctgtaatcccagctactcgggaggctgaggcaggggaatcgcttgaacccgagaggcggaggttgcagtgagccaagattgtgccattgcactccagcctgggcggtagaaggagtttccagctcaaaaaaaaaaaaaaaaatgcagcttaagtgctggtttagcgcctgtaatcccagcacgttgggaggctgaggcgggaggatcacttgagcccaggagtttgtgactagcctgggcaacatagcaagaacccgtctgtacaaaaaataagaaaaattggccaggtgtggtggcgtgcatctgtagtctcagctccttgggggctgaggctgaaggatcgcttgagtccagcaggaggtcaaggctgcagtgagctatgatcaagccattgcactccagtctgggtgacagagtgagaccctgtctcaaaaaaaaaaaaaaaaaaaaaaaaggaaacaagaaagaaaaaagcagctaaattctgctggaagtgtgcagtaaagcacaagttttcagccatcaacgcagggagccgttaatcacgacccataataaccagaatgttattccacggttgcggtttgtttatttcatcagagttgcgtcttcacctatttccctccctactcttaattgtttatccaagttagtgttttccattctttcactgaaggctctaaaaatggtcccatcaagaagtctggtagataatggaagacgaagtggactttacagaaagatgaattttcttccctagagctggaaaacccttcagcgtgtcatgcgttccccagccaggacagacaaagccacgcaatctgtttcctgcaggcccagaggggaaggcttcctccttgtggttagtgacttcaaaagctgtcctcactagagcaagtccaactcttcctctagttctgatgacttcacggcagccaactgagctgctgaacgctgtttttttctacgcagaaaccctcccgactttcacgaggagttgacaggttttcctcttcactcgggctcccttgtcatcgttaaactgaaactgctttcttgtagccaaattctgtggtcccttttcggcctcggcctccttgacctctctgtgtccccaccttggctctcccacgcctgccagccgtaccacaggccccgggtgtgaaccctccctccgcggtcatgcagccacgcctctgctcaagctgtgcctcctcctgggcgcaccctccctctcccatccttcagcctctgaagtcctgcccagctccggttcctgtttctgttaggacgaggcccttcagatcctctccagcaggtggactctgtcctgccccgtaccacccgccgcgggccacttttgggcctgcgccatgttcctgcccttaccccgcccggtgttagcgtcacgtgggtcctgatgtcctccctctcccaggcctctgcttatctgattgggggctgtgcttgactctgaaacccgggcacctcctacagggcattttgcctgtcacaggcctagcattcaatacctatcatatttttgaaatatctgcagaaataaaaagaaataactattttcttcttcaggagttaagatgcgtggccaccaagtacttttcaatacataaaatatgttttcagcacagaaaggcctttcaccgctcttacttacatagtctgcttttggtatgatggggacggatgaaaaatgaggactgtaggcctccgaagtcagctgttttgaattaaagcagcgcacgctttgagtcaggtgaagcgaggatggggtttcacccgttgaggatgaatttgctgggttactttaaactggaactgttcttttcagaaatgagtgaagcaggaagggaaagacggagcttgtctggctgggtcggatgaccccctttgccaggccgtcacccctctaggttgagttagctcagaataacttagctgtgctatagctttgcataattgcaaggagctttgtttcgttttattttgcagggaatttttttccccccttagctcttcctcctggtgtatttgtagaaatcagcttcatcatggtcatttaacagtaagggctgggggtggtggctcacgcctgtaatcccagcactttgggaggccgaagtgggaggatcacttgaggtcaggagttcaagaccagcctggccaacatggtgaaaccccgtctctactaaaaatacaaaaattagccgaatgtggtggcacgcacctgtactcccagctcctcgggaggctgaggcaggagaatcacttgaacccaggaggcggaggttacagtgagccaagatggtgccactgcactccaacctgggcaacagagcgagactctgtctcaaaaaaagagaaaacagaacatactatttttgttgtttctgaggagtagggtttcttaccagggaacctgctttaaaaaaatgcagtatgtagattccttaagaataaagttaagcagcagctaaccaagcacatggctaaaaacccggccaagagcattgtagtatctggttttggggttggtggtggggatcccattttagaggccgactttggtttgtgatggttaggttttactttcttaggtctcagctcacatgtccccttctcagaggagccatcctcacccatcccttcttggtccctcccgccttccctgactttttcttcttcaatgacttatctgcacatgatcccctacttataaaacctgtgtcttccactcctctcacccgaaagaatgtttgaattctgaaaacaatgactttgttcttagcacccacaacagcaaatgctcagtgagccctatgttgagtgagttagttgtgagctgtggtggtttagtgagggtatactttggcccttagaatgcgaatgccttttttttttttttttttttttgagatggcgtcttgctctgtggcccaggctggagtgcagtggcacgatcttagctcactgcaacctccgcctcccaggttcgagagattctcctgcttcagcctcctgagtagctgggattacacacactcgctaccatgctcggctaatttttatatttttagtagagactaggtttcgccatgttggccaggctggactcaaactcctgacctcaggtgatccgcttccctcggtctcccagggaatggctgtttaatcacaagaaagtcttcccttcatgcgttgtgaaaaccagcagtattttaattgaagaaatccggtattgtttggctttctagatttggaagtaggtcaggtggctaatgattgaaaatggaccggcaaccagagggcctttggaaactctagctcgacttcaggctatagttttgtttatgcccttgtcactaaaggcactgcccatgagagctgggtttgcagtccctgctgagcctggggttgagagcagagccctagagtaactcagcaaaggcatccctccctgcacctgagctgggggagaggcggcttatgattaactcagcgatgtctcaaatgccatttctagaggctgaacacattaacttttaaaaaatgatttaaaaattaccaattgaccgtatccggggctgaacctgcgtgattcagcttcttttaaaaatatcttttctcaacaaattgcttccttaacattttaatttgttgatcatcaaggaagcttgccaaatattagctgttcttttccatttcctaccgcctcaagcttcccgtatttggcctatttcagtggagctgtaaggtcactccctatttttcttcccaaataactgtatttattactgtcaggtattggcgggtttgatccagctgtcatcagaacgtttggaaataccgttttttgccagaatgctgatttaatgatctcatactgacatggcttgttctctctgcagacttgataacttgttgaatatgttccctcttcttattgagcaatggtgctttttgaaaatttttcccagccagaaggcttcatgggtagtatctttaagatcctagcagaaggttgcttttctctctctctctctctcagtcctttctttttctcttttctttgcttctttccttctttcctttttctttcttttctttcttctctttctttctcttttcttggcttatttccttctttcctttgtctttctttgctccttccttccttccttttcttccttcccctttctttttccttccctccctccctccctaccttcctcccttccttccttcctctctctttctgtctctctgtctctgcctgctttttcctctctctctctgtctctccccccttctcccctctcctatcctcttcttccttttttctttttttggaaggcccagattagtagcagagactctccttgaaggggatagatgcattgtcgctgtttggtattttgaacagattcttaagaaaatgttttcctggtggaagatttcagacacacatgaggtgagaataatgaaccctgtgtgctgcccccagcatgatcagttccaaactattggcctgtctagtttcatctccgcccctgcctactcctggaattttgaaaaggacatcatattattttctccataaatatttcagtatgtatctctaaaagataatgtcacttcgaaaaaaatacctaataccacgatcacacctaaaacataaatgaacaatatgaaggatgagtttctgctgtgtggcatggcagaatgatgctctgtggggtcccaggggagaggtgagctaagttcagtgtgtcacctgctgtcacctgccatcacctgtcccagggcctggggctagccactgctcttttgtgagcctcagtttcttcatctataaaactagaggattgtactagtctgtctgtctttccttcctttcctccctttcctgtcctgtcctgtcctttcctttcctttatcctctctctcttttatctccccttcctcccttccttccttccttccttccttccttccttccttccttccttccttccctccttcccctctcttcttctctctttcctttttttaaagagacagagtcttgttgtgtcacccaggctggagtgcagtggtgcagccatagctcactgcagccttgacctggtagtctcaagtgatcctcccacctcagcctgtgaggttccgggaacacaggtgggcaacaccatgcctggctaatttttaaattttttgtagagacaggctagtcttgaactggcctcaagcgatcctcttgcctcaggcccccaaagtgccgggtttataggctgagccactgcacccggcctgcactagttttttttgtctctagaaatctgcatctctgaatgtgttaggtcctgacctgctttagaacggatctcagccaccctgctccttcgaacccacatttctgccccgtgtctgctggtcgcaggaattggcacattttcctttagctgcgcccaccagtccttgcacgcatactcctggtcacttttttaatgtctggcagatggtttcaagtgcaatggcgtctctgcgtaatagttgattctctaaagaacagagtctactaagtggaagctgcgtttccacatttagcagttagctgttaagagccagtaacaggtgcaaatttgcaacccgttttttccccaatcttttggaatggaaatggttcagtcatttgaatttaacaaactgcctgcccggcatgcactgcagatgctgggctgcaaagctggttttggtgctggttggccccctgggtgcccctgtctactgagggtgggacaggcggaggactgggggctcagtgctgcagaggcacatgtagggtggggtggggtggggtggagaagaagtcctgaccagtcctgatttggtggtgctggtgcttatgggctagtgagatttctgcatgcccaggctggctggtagccatgtgtcagtcactcataatcccagtaccagagttatcatcacccctaacttttttttttttttgagacggagcctcactctgtggcccaggctggagtgcggtggcacgatctcggcttactgcaacctccacctcccggagtctccctctgtggcccaggctggagtgcagtggcacaatctcggctcactacaacctccacctcccgggttcaagcgattctcctgcctcagcctcccacgtagctgggattacaggcgcctgccaccatgcccggcaaatttttatatttttaatagagatggggtttcaccatgttggccaggctggtctcaaactcctgacctcatatgattcgcccaccttggcctcccaaagtgttggggttacaggcatgagccactgtgcccggccacccctaatgttttgatttatttcctttgaatttttttttctctgaataaatggattgatgatatctattgacatagtcagaaactcaagaaacatctatggagcatctagccatggagcagacactcctgttggtctcgggggtgtgtggcgggaaggtcagagtccttctagtcctccaagagcttccagtctggtgggtccctagaatataatacattgtgtgttgtcgtaggcgggacttgcacgctgtgcagttggctttacggttgacaccaggccaccagtggcctcctccgcctgcccttccagcctgcggttgtccttcagctgctgcctgtgaaatgtgatcctttccataagtccccagcacagagactgggaaggcagtttctaagaaggcccttctgttgggctggctcagaacctgccccctttcctctgacttgcctataaaaaggtgggtttttcctcctgcctataaaaaggtgggatttcacactgacataatttacatcgagggacatattaaacctggtgtaatttgcaagtgtgccctgaacacgtttcatcatcaggctcgttgtggagaccacggtgtccctttccttcccatcgtaagtccccggtgtgtgtgtgtgtgtggaaagtttagagctcccaaagtttagagctcagagaggataaagacccgtattactaaacttatcaggaaaatgtggcttcagattattttttttcacagcaataattgcatttcatgtattttttttttttacttattacagaaaatttcaaatatatacccaaacagaagaagatcatgaatgcttttgtgtccatgactcagcttcaataataattatttacttgtcgctggccttgtcttatctgtaactttctcatcgctcacccgacttaaattttgaaacaaatcccagacatcatatcttttgccatccacagatacatcagtgtgtatctctaaaagagaaggactttgcaaaaagtacaaccacaataccattagcacaccctcgaaaaatgacaaagattcatcaatatcagctatccaatatcaaactgccactttcccacaaatgtcataattaaaaaaaaatttgtttcaatcagaacaagaaaatccaagtgagattcaagagtcccgctgggactggttcatgtgtctttgtcttttgagagttcttttttttttttttcttcttttttttttgagatggagtctccttctgtcgcccaggctggagtgcagtggcatgatcttggctcactgcaacctctgcctcttgagttaaagcgattctcctgcctcagcctcccgagtagctgggattataggcatgtgccaccatacccagctaatttttatatttttagtagagacgaggtttcgccatgttggccaggcttgtctcaaactcctggccttaagtgatccacccgcctcggcctcccacagtgtggggattacaggtgtgagccactgcgcccagccagggctctttttatattgcaaaactgaaactctgcacccattaaacaataacactccatttcttccccaccatgccctggcaaccatgattccactttgtctctatgcctttgaccactctaggtccctcgtctaagtggaatcatacagtattgtctttctgtgactggctcagttcacttagcacagtgtcaaagttcctccatgtcgtagcttgtgtcagaatttcctttctttctaaggctgaacaatattccgtggtgtgtgtataccccattttgtgtattcattcatcaatcagtggatgcttgcgttgcttctaccatttggctgtggtgacactgtgtgaactctggtgtgtatatatctcttcaagacccagttttcgtttcttttgagtttatacccaaaagtggaattctgtttgggttgcaccattttaaattcccaccaatggtgcacaagggttccaatttctccacagcctcgccagcatttgtcattttctggattgtttttttttttttggagacaggatctcactgtgttgcccaggctggagtgcagtggcacaatcatggctcactggatccttgacctcctaggctcaatcaatccatccacctcagcctcctgagtagctgggactataggtgtgcaccaccacaccccgctaatttttatatttttttgtagagatggcgtcttgctgtgttgcccaggttggtcttgaactcctgagctcaagcgatcctgctgccttggtctcccaaagtgctggggttataggggtgagccaccatgcctagcctggatttttttcttttttaatggtagacatcttagtgggtttaaggtggtatctcattgtggttttgatttgcatttccctaatagatagttatttttatttttatttaaagggagtctcgctctgtcgcccaggctggggtgcaggggtgctatcttggctcactgcaacctctgcctcctaggttcaagcaattctcctgtctcagcctcccgagtagctgggactacaggcgcacaccaccatgcccagctaatttttatatttttagtagagatgaggtttcaccatattggtcagactggtctcgaactcctgacctcaggtgatccacctgccttggcctcccaaagggctgggattacaggcatgagccactgtgcccagcctaatagatagttatttttaatacttatttaagcttcatgtttcaactgggggtgcttcatgatatattaatatttaatgagccaccttaattatttctaaaaaagtaaaaaagggaaatactatctcccacatggtattattcatgatgtatatcttttttttaaatgttttgtagaatcggaccaaaatcagaccaatcctctcagtttatcacaaagataccaaaacccagagagaatgaggctttgccttagcctcggccctgggagatagaagaggagcctggggcctgggttccccctgccgtggctgcccagtccttccgctgacaccatttcgaggtccccttgtggaacttctgtgggaggccaggtgcacaaagtccggtttgttgagctacagatgcccgccagcagttgctgttattatagactggttgttctgatttgtcaagaaacccagaacaactgtttttcttctttgcagtggatgtgtgtgcacatgaccttttgagaacatatttcctgatgtggtggaggcactgatgttcgtgcagactagctaagttaaatcttcatttctttcagctgaaattgcctggctgctcctttaagaagtgcactgtgtggagttatcatgtttctcatgctgttaaatgtttactggcaatcctgtctactttagcgtattgttgtcaaatgacaagggagtcccctgtcagagagcaatgacacagcctgtacttttgggggcagccagcgtccgagcgtttccacattcattcttacgcagttggtaggctcaggatgtttgtgaacgccgaagggtgtgcgtgcaccctggagtgtggagatactagcatgctatttaatgatggccaccacgggacgtgcgcactcattcattaagctaacgttttatggtttgttgagtgaaagcaggcacaatggtaggtagtgggtactggagcaaatgactgcaccggccctcatgggacttccatttcagtggattcaggggaaagcagcacgtgtttttgagagaccttggcaacgcaggcgaccttgacgtcgaccaaaagaagagagatttggaatgcttgttttacagcctccggtcaaaaaaaatcatatgggaccctttattgcagactggaacatttatttcaaggtctcaaattaaactagaggaggccaggcatggtggctcacacctgtaatcccagcatgttgggaggctgaggtgggaggattgcttgagcccaggaatttgagacctgtttgggcaacatagtgagaccccaatctctactaaaaaaataaaaattaggctgggcatggtggctcacgcctgtaattgctgcactttgggaggctgaggtgggtggatcacttgaggccaggggttcgagaccagcttggccaacatggcgacaccccatctctacttaaaaaaaaaacaaaacaaaaattagctgagtgtggtagtgcacgcctgtatttccagctacttgggaggctgaggaactagaatctcgaacctgggaggtaaaggttgcggtgagccgggattgcaccactgcactccagcctgggtgactgagtgagacgctgtctcaacaagaacaaaaactaaccagttgtggtagcacttgcctgtagtaccagctatttgggaggctgaggtgggaggatcacttgagcacaggagttggaggctgcagtgagtcatgatcataccgtggcattccagcctgggtgacagagcaagaccctgtctcttaaaaaaaagttaaactagagtagataaatgagcaggcatagttgtttgctgatcattcaccgttgagacaatgaacagctcgttaaataaattgttggtaacaatgaaatcaggagaatttcaatcctgagtcagtgtacacaatacaaggcacaaaacgttgagttaaaggtggttctactttgccctctaagcattttattgacttcaaaacctacaaaggcggcgccatggcatataggaatataggaataaggcatataggaataagaagtttcaaaaagtttcataaaagttgtatttggggctgggcatggtggctcacgcctgtaatccctgcgctttgggaggccaaggtgggtggatcacttgaggtcaggagttcgagaccagcctggccaacatggcgaaacgccatctctactaaaaatacaaaaactagccgggcgtggtggtgcctgtaatcccacctacccgggaggctgaggcaggagaatggcttgaacctcggaggcggaggctgcagtgagctgagattgtgccactgcactccagcctgggagacagagcaagactctgtcttgaaaaaatagaagtaaaaaaagagagagagaaaagcaaattacctgaaatccagaaagatcagagaagggaaggaatggctggagtaagtgttgatcagcggacacactcaagggtttcgtaatgtgctcgccctgccccaggcatcaagggaggtgctcactctgtgcactctgaatcccaccaggggcccacctgccaccctgttctcacctgtgaccactcacggcagccacaagaggcacaggtgttaggtctgccccagccacaacacctcagcacgtggtgtgtggcttcaaccaggtcaccgtgggcacactgggaggggagggcttctgtgcggccacgcttaataaacagtctgcctgggaaactgagcatccaaagtgccctctgaaggagcgggatgctgctgcccgtggtggctccgtcacacgcattctggaaggtacctcccggtaagcaacctgatgtttcatctgtcactgttgatgcatctccatgttagagaattaagcatatggaagcaaaacacctcaggaatacagaacgcattcatgatcaccacggaaaatcaaatcaactcaaagtccaaatgcaactttttttttttttctgagacagggtcttgctgtgttgcccaggctggagtgcagtggcacgatctcagctcttagtagagatggggtttcaccatgttggccaggctggtcttgaactcctgacttcaagtgatctgcccgccttggcctcctaaagtgctgggattacaagtatgagccactgtgcctggcctctcttttttaaaaaaaatagagatgaggtctcgctatgttacccaggctggtctcaaactcccggcctcaagcgatcctcttgccttcacctcccaaagtgctttgattacaggcgagcttttctctttttaagccaacttgtgagtagaatcattcacttgtgcctttagctgttgtctctgtgttgaggaatccagagtccagtccttctagacttatctggggacccgagtttccttctgtagagttaaaacctgttgcatccatccccagtccctttacggcacctgtgtaggcctgtagtggagctggcttttgtcctttgctgtccctggctgagccttggcctcatcttgggccagcgcctcctcccctgggctgctgtgatgtgttggcatttcctgggtagagtcttgtacttgctgttttctcctgtctcagtcttttcccccagggacctggcatgtctgtgtgttggggaccctttgctcatcttacacactgaggacaggcaccttagcgcttggtgccctgggatggaacagccactggacagccagccctgtgccctgtgtccactgcaaacctgatcctgttttttggagcccttcacttggcaatgagaccttcatgggtggggttactgaagcaggagttggtttaagttaaataccatcagccgcaaagctcagaatggatgatgaagtgctttaggggttgacagggcagagctggctgtagggagtgatggagagaggctcccaggaggggaaccctctgacgtgggagttaaaggactggggccatttgtcgtggggggatgggagcagtggcttgggaagggacagaacgggagcaagagggccttgcgcactgatgcttttgaggactgaatctgaacgggagagtggggagagggctggaaacctgggcgagaacaggagaggagaggcccctggatgccagcagagctgtaggcatgatctgggccatgccctgggagacgcttccgcaggagatggtgcggctggggtggagacttcctggcttccgagggcgggcgagggggcaaagggcctggggcatggacttgggcaggtagcaaaggccagaaggagtgggagtcattccacctgggatgtgggaatggctggtgggggcaggtagggggagaccaggatgagccccatgtgcgcgtgacctgtggcagaggggctgtgtcagagccccggctggcgagaggagcatcactgtgtccagaggacgcggtgcctttcagaccccttgagtaagagacagagtgggtctgtcctgtctaggctgagttttcattgcccagcacagtgcctggcacacagtaggtgcttaataaacacgtggactgaacacaagaggttgaggggaaaggtcggaattggccacaggtctcctaatgcctggcatgtgcgtcaacgcatctctgaggatggaatttaaaggcaagagctggaggcccagggctgaggctgtggggtgagcacagcatttgcggggcgcgggaagggagtggctggtggggcgggggagggaaaccagcacgttagaaggtcagccaaggtcaggcggccagcagggcgggaggaggcgttggtgtgcacacgcggggagcctccgtgtcctcaggacaccatggaagacggcaggacacacgtgcgagccacagcaggtgggcgggagctcacaggctgcagaggaagcgcaggggaggcgcaggggaggccaggctctggcatttcccaggaatgtaaaccccggtttcagctttccccgtggctcccctccgccaaatcttaaatcctcttgttaagacgcgctccgcccctgtgtccttatttcccaccgtggtgggcagcttgtctgccatccccttccaggtgccccgcagaaccaccacccttgggaaggcggctcctcgtgccccccctcttgtgccttccctccccagtgccttttctgaccccctcctgagaccgcctccctgtgggccatttgagcacctgtagctttccatccggtgtcttcacccctttgctctttgtagctgtctcaccccgctgcagcttgtgaggccatgcaggccctgatgtttagtgttttttttgtttttttttttttttttaaagacagcatctccctttgtcacccagaccgttgtacagtggcaccatcctagctcactgcagcctcaaccttctgggcataagcaatcctcccacctcagactcctgagtatctaggactacaggctcttgcacccaccacaccgggctaatttttgtattttgttgttgttgttgttttgtggagacagtgtttcaccatgttgctcagtctggtttcgaactcctggcctcaagcaattcacccgccttggcctcttaagtaccgggattacaggcatgagacattccctaatgtttagttttaaagagggggtggtgctatttatctccaggctcaaagcagggcattctttccttaggatctgcgatactccagtcaaggctgtttcttttctgccttttgtaaaactcttgtctagaaattaatggatgagggaagctagggactcttctcagattatttcttgtgaaaacctcaagagtctgaatttacagggaaatcttacaattagctcgatgtggattacagagcggcaaacaaccttaagtggtagagctggttctgcaagatttttccaaccctttgtggtctagttttcatttttccccttttaaagttgttttcagctaaagctgtgaggacagtatagagttttgccttgtaaaattggtagtgagtaattttagaatagatgcttatgaagtctgtaaataaatagtaaggcgcctcgcctagttccacgcacatgtcagtttcgtaactatctccccaagctgagctcacctgccagtgccttggatggacctagccaccaggggctgcagatgagtaggagagcgggtgttgcccagagcagggcggacacccctgttccctgtcatgttttcttctcaaaacctgctgcaggccattggagagcattcctgttgctctctgcacccctctttctgaagcattttactgtgtgatcctagcatccgtggttcaggagatcctgctacattttcctgactgccttgctctgcccgggaatacctggcttatcagcagaatacaggcctctgcttaactgaatttggtcctgtagtgaggactaagaagtgatgtactcagttacatgataattctaaaaaataaaaaaaagcctttttttttttttgttaacacccatcatagtggcagaatcttaagtctgcatgtagagggggttggcagggcagtagaagcagggggccctgtgtcctgttggtagaagagtgagcagaatggccactggagagccacttggtggaggtgcctgcagcacagcgagcagcctccttcccagatgaagcatgcatcttagaggcgaccttgggcacgtgcacagtgagacaggtacaggagtgtctgttgtcatatattccatgggagtgcaagagccggaaggatgcagatgtgcatgggtggtgctggcccccatcaggtggcatctagtagaagtaagtaagggtggtggtggcatgtgtggtcaccttgccagcgtcgcctcgcacaggaaagggctgttgaaaatttgtgggccgggtgccgtggctctcgcctgtaatcccagttctttgggaggccaaggcgggtggatcacctgaggtcaggagttcaagaccaccctggccaagttggtgaaaccccgtctctactaaaaattaaaaaattgactgggcatggcagtgtgtgcctgtaatcccagctacttgggaggctgaggcaggagaatcgcttgaaccccggaagtggaggttgcagtgagccaagattgcaccactgcactccagccttggcgacagagcgagactccatccccccaaaaaaaaaaaaagaaaagaaagttgtgtgcagcgtgattctgtgagttcaagatgcaaagcaatgactttacattattaaagatctagcagacatagaaggatattttatttatttgtttatttatttttgagacagagtctctctctgttgcccagtttggagtgcagtggcatgatcttggctcactgcaacctctgcctcttgggttcaagtgattctcatgctgcagtctcccgagtagctgggattacaggcgcccatcaccacgcccggctaatttttgtatttttagtagagacggggtttcaccatgttggccaggttggtcttgaattcctgacctcaaatgatccacccaccttggcctcccaaagtgttgggattacaggcatgagccaccgcgcccggcccatagaaggatttttttggggggaaagaatctgtaaagtgattattttggaggtggagaggagaaaatgagactaaagaagatagagtgggggcttctatgattttttttttttttttaaatagatatgacaaaatgataaaatttggtaaagctatgtgttaggtacataggaatttatacttttctgtatgcgtgaaatattacgaaaaaataaagccacatacactatctgtttttgtgtgtgtatgtgtcaataggatttaggccttttttgcacttctaggttaaagttttcaagatgagggtattttttccccctctctgttagagaatactaaagttatgttggttttattttttattttatttatttacttagtttttacaatgtaccattttaatcatttgggtatcctttttaaaatctctgagcttttttattttttattttttttgagacggagtctcgctctgtcacccgggctggagtgcagtggcccgatctcagctcgctgcaacctccgcctcccaggttcaagtgattctcctgcctcagcctcccgagtagctgggattacaggcatgcactgtcatggccagttaatttttgtatttttagtagagacggggtttcaccatgttggccaggatggtcttgatctcctgaccttgtgatcctcccatctaggtctcccaaagtgctaggattacaggcgtgagccaccgcgcctggcctcagcttcttttttttttttttttttttaatttttattttaagttccatagtacatgtgcaggatgtacaggtttgttacataggtaaacgtgtgtaccatggtggtttgctgcacctaggtattaagcccagcatgcattagctatttttcctaatgctatccctccccccaccccatatgttttattttattttttatagagacagggcctcactatgttgcccaggctgatctcaaattcctggcctaaagcgatcctcccacctcagcctcccaaaatgttgggattaccaagtgtgagccaccatgcctggtattatgttggctttaattatatttgtggaagaacttctatgttctctttccttattttaaatattgggagatagatgaaacattttaggtttctctacatttgaagaagaggtatattttcttaggttcttctttttgtgagacagagtgcagtggcacgatcttggctcactgcaacctccacttcccgagttcaagcgattctcctgcctcagcctccggagtagctgggattacaggcgtgcactaccacactcggctaattttttgtatttttagtagagacagggttttgccatattggtcaggttggtctcgaactcctggcctcaggtgatccgcctgcctcagcctcccaaagtgctgggaatacaggcatgagctaccgcgtcctgccaggttctccttttgatagaataatataggtacttgcctctgtttctattcagtatcagtgaattatctacaggaaaatgaacacaggaagactgctgaagtaaagaggcccacagtgcctgcattcccttgcctcatgtagtcttagactattcaggatgctttgaaaagagtaaactgtaaatcatatttcatattctttgggccaggagtctggaatggtttcatattgcctgtgaaacaagagatgcttctcagaatgagatttctggcttaattgaattcggattattgcaggcaggatgggagtgaaatggtacattcctttcatgccagttgtggagaggatctccgtgcaggccgttgatagaataatatcctgtgcttccttggtgtctctctctgaggaaataagggcttaatatgtcctattcaattaatcctcaccgcatccttaaaggtgactggaaggcagatagtattaactccattttacttaaaaagcagcggaaacatggtgatttggaactccctgggagccctcgaacttttctctaaactccaccggtagctgaggagcaggacacacgcacagaggaaggacatatttatggcgcatcgccttggtgccaggcaccgttgggaactttttaggatcgtgatgtctttgaattctcaggacgtttctgcgaggtggtgggcggtatcatcctggtttttcagggagaagtcaagtcactggcccaggtcctcaagctggccagtgtggcccggtctgaccccgaggttctgcccgggtttctgtccctccagcctggcatcgtgaactcaggggaaacagatggggaatctgttgttgtaacaaagattctaaggatttgaagcaaaatcaacacactcagttgtagagggtaccacgtggttgataccattgaagacaattgcacctaaatgaaataatttgatggcgtggagtccagtttcagagcgtttgcatcacaccttctgacaccaggctggggggccgcctgtcccagagcatcgaggacagacaccgctgctgttagacctcattccacccctttagtggggacccaccgcgcgctggccgcaagcctattttaatttgtaacaattctgcttgatgacaggaagacgtcaaaaaggagaaatcaggctaactggggctccttgtccacttggggggcatgtctcagtgtcttgcctggggccttgtacacaccctctcttaccgggagtaaagtgaggtttagaaagattacctttgtcctgggtcattcttccttaaatcacagctaggatgcaaacccagacctctctgatgtcagtttgcaagctctttcaggtaccgtcagccacatgccaggccttcagtggggtgatgttttttgttgtttttagaaaatactgctattcactcatgggaaatagggacgagggcttagatttcagctgctttgcattagacaatgatttctcttattataagcagagctctctattaaccaaaaacacttggctgttagacatggtgtttaattgctgttagaatgtatttttgtcacactgccctataataagccaaagaactgtttgtgccaaacagtgaagggaagctaggggaggatgaaaactgtgcctgctactccacctcccttctttcgaggtcgtggtgttttgtttgctgttttagctgtggtgtgtgtgtaccactcgtacctttcacaggaggacacctcatctgaataccagtcaggacctgagacgcgttgagcccctccccacagtgcccacgggtaggtgcgccgctctctgccccttccgggagctctgctttttctacctttagagatttctttcatcctctattacgtaggcctgactttttgcctaataaaggaaaaacaaccatctatttagcactctttttttttttcccaaaatggaaatgactttctctctgatttttacaaagcaaaaaatgagagtaaagattaagaaactacaagaaattatggtgaagggagtaaagatggccatgaatcctatgactgccgatggtttggtcccaggatgcattattcagatattttctccctgtgggcttatgtaaacagaaagctaggtgagtggaagtaacacgtcaaatactgatttgtggctgggtgcggtggctcacgcctgtaatcccagcactttgggaggccgaagtgggtggatcacctgaggccaggagttcgagactagcctggccaacatggcgaaaccccatctctactaaaaataaaaaattaaccaggtgtggtggcacacgcttgtagtcccagctactctggaggctgaggcaggagagtcgcttgatcctaggaggcggaggttgcagtgagccgagatggtgccactgcgttccagcctgggcgacagattaaaaaaaaaacaaaaaaaaaacctgatttgcaacaattttgtgtcctagcctagagtttaccgtgctattgaaaatatctttcggctgggcgcgctggctcatgcctgtaatcccagcagtttgggaggccaaggcaggcggatcacgagatcaggagatcgagaccatcctggccaacatggtgaaaccctgtctccactaaaatagaaaaaattagccaggcgtggtggcacgcacctgtagtcccagctactcaggaggctgaggcaggggaatcgtttgaacctgggaggtggaggttgcagtgagttgagatcgggccactgtgctctgacctggcaacatagcaaaactccgtctaaaaaaaaaaagaaaaatgaaaaagaaaatatctttcaatgatagttaatatatatatacacacacacactgtatttgaagtgacatgttacatggttttccactatatgatttctcatatttcatcaaattgatcctcttgaactcctgacctcaagtgatctgcctgcctcggcctcccaaagtgctgagattccaggcgtgagccaccgcacccggcctctgatctttttttcatctttttcctagtttctgacctcactaccactctgcaccacgttgggatgggtatccttgtacatccgtgcagcttttctatgatttttaatgtctgattattttcttaggttaaatttctaaaagtagaagtgaacagcgtgtgcacatttttatgactttgggtacatttcattacattactttccagaaaagttggaacaattcatagcagtaactgcactgaatttcttgtattacttacctatttttaagcaagtaatataatctcttggttccaaaaacaaagcataaagaaaagtctcctatctgcctacctccccacccactgttgttgattttttggtgtgtatccttccagagtttcattatatacacagaaacaaataccagtgtcaccctcctttgtatgcacatagtctagcatgccatgcacactcttgtgcaagtggctttttattttttaaaattaacaggccaggtacagtggctcatgcctgtaaacccagcactttgggaggccaaggaaggcggatcacttgaggtcaggagtttgagatcagcctggccaacatggcaaaaccccgtctctactaaaaatacaaaaattagctgggcatggtggcgggcacgtgtaatcccagctactggggaggctgaggcaggagaatcgcttgagcccaggaggtggaggtttcagtgagccgagaccgtcccactgcactccagcctgggtgacagaacgagactctgtttccaaaataaataaataaaaattaacagtgtttcttacacttttcaaatcagtacattaaaatccctccaattgtgtgtgtgtgtgtgtgtgtgtgtgtgtgtgtgtgtgtgtgtgtgtttattaaagcgacaccattgttcaatgatatgaataggtatattttatatacttggttccattttgatagatatttgggttgcttccttgaagaatgttgtgcgtacaccgtttgacacaggtgcaagcttatctgcagggggaagccgatttgcaggactcattcctatagggagaggggccaggcccagggacttaagtgtttgtgaatttgtaggaactgccagattacccacacttagcagtttacaccccttccctccagcactggctgcagagagccctgtcctccagggccctaatgctaattctttcatgattgcactaattatatgcacaaaaggaatgcaacagaacaaaacaaaccacctggttttgtaggtgtggaagtgcacattgcagtaaggagtcaatgaaatcggttactgtgggacaggaccctcccctccccttggttattttactaacttggaataacgccacttccttgtaggaaacaggcagtgactgtcagtgagtgtgcctaggagaggggtgggtccttttagagaccaacctcgcagttagccagcaacaggctgcagcttagctagatgaaaagttagtttgagaaactgaagtcattgccgctaaggctggcaaggtgtggctggggccaagttgggggaatgtcgtagtagccggccctgtgcgcctgagcccacaattactgcgtcgctgctggggtctggcaaagctcaccttgatgcagttttgttcaaagcagtgcaatttccaagcctcaaaacagatccttttcaatacaatgtgattgtaaaaattctattaataaagagaaaaaaaagacgcaccagcggcttacaagatctttttttgtttttttttttaagagacagagtttcactgtcgccgaggctgaagtgcagtggtatgatctcggctcactgcaacctccgcctcccaggctcacacaattctcctgcctgagcctcctgagtagctgggattacaggcgcgcaccaccatgccgggccaattttgtatttttagtagagatggggtttcgccatgttggccaggctggtctcaaactcctgacctcaggtgatcctcctgcctgggcctcccaaagtgctgggattacaggcatgagccactgcacccagtcacgagatcttaaagtagaagtaactatggtatttttttcgagaattctgttagggcgagaagcccattcgtactgtgctggaaccatcctgaccctgtctgttctttgcaggaactcaaaccaatatgcctaagtagctgaaactgttgcatttcaaagccttttcaagcatatcttgaggacactgttccctgcagctgaactgaagtcttgatctgagcccaggaggagtccctggggttgtcttgttgggggtggggaagtgggaatgcttgcattcagctttgggggaccttaaccctttgccccctcccctgtccccccttcacatagctttaacatgaaagtctttctgtctgtcagatctcccctgtacaaagagtggtctactctaaaaattgctttgaaattggaatggacccctccctctcttctattttagttctagtttctagctctttaaaataatgcaacttttcgctttattgttctaaatcaatgcattctagccgttggctgtcccagttgcttccctgtggctgggagcccctctctgtggttgaggctggtcttaccattgctccagttgtcttcggccttctggggcttacttcccctgccctggaggcctgaggccagccagccagtgtggtgtgacccccctgacagtgggctctcccggctggcccagttgagggtggtcagttccttttgtggccttgccttcttgggagataaaagtggccccctgggtgccgtgcggcccgcccgcagggtccttggtggagctccagcattgattcctgcaggttcagctcctgccccaaggcagcgtccagctggctgagtggggttctcccagggtctctaagcacaggacagcctgcttctgcatgggggcgcacaggggaccgcagagtcacactcagacccttctaccacctcctgacttgtggactttggtggtgggtggcgacaaactggagtccactgggtctgtggcagagaaaggtggctttgctgggggctgggggagaggaggcgtttttggatcgcagcatataccttgtctagaattgtataaaaacctacaggaaaaggctgatttttttttaaaaaggctgtttttttaaaaacaactaaaggcacaaaaactccaagtgtgagaatatccagaatgcgtttatataatgtgcaccgttgaaaggaacattgaaaaaacaaaaaactccgaggaacaggtcattgggtttggagaagtttccttcagaaagttctcttcctgctcgttcactgtggattaaagctcgttggcaatttcggaagttcacgttcttgagactcggtgcctttggaacaatggctcacaatgaggacggtgtgcgttcccggcaagaatgagtgttgggggcttttctccttatcacccgttccccagacccctctcatcggcctcataaagaaacagatggttcatcaggaatagctcagaaatcacgttggctcctggctgtataaagagtgggaactgggatcataaacatttgaaatctcctaggaaaggacaatgattccctcaatgaaatattgatgtaaagggagcattttaaaaggcagaaatgatgaacctgattcaggttgaagctggtagtgtactttaacctttttgagaattgttaatttaaaagcaaatagaatgaaatatagactataaaagcagattaaatcatttttatgcatcctgggttttttggtgtcacgtgacaggaagagttactacaaagaagaccaggttttggaaagacggtggggttcacgtgatgaaacacaggccatgacccctttaggaattggatggaagccagccaggccaggccccccacccccaggtcctgggttggggctctgtgggcccaaggagtcctccagaaccaaattctccactaagagcaatttttaaaagagcagctgctcatcccatgtccaattagagtgagcagatgtgtaagaaacatgtctttgattgattttgggggagccccccgcagtttgatgttttgcttggaggtaggggaaacgggggctgagttacaagtattacctgtaggaataaacaattcttttgaaacatcagtagggaagaaagaaaaaaaaaggcagcttaagatttatctaaaaaggaagtggaaagttaaagttgctggagatctcattactgtctgtctcgctcaccgtaattaaaaaatgcctgaatgatcttaataacacatgattcagctgacaagcactaattgccctgtatcaggccaagagaagatgaatgttgtcaagaaaaccacaagtcagacaagctgattctctgtgagtctgacaccgtgttcccatgtacagaccagtttttactggagttcttccagcatcaaaagcagcttcttaccttcccattaattttcatcgctggcaggcccgagttgtttgcgatacactgactacctcccttgattcctcctcgctggctcaggagcttgggtctgcagacaaaatgtaaatatgtttcttgctcttatctttgtcctttttcagggaagaaatctgttcccgtccaatatgaatgccctggtgggcttgtcagtaaattacatggtatttgggaattgattttctgacgccaccgatttgtcaagaacttatcctgccttttcagcgatttgacagcacctgttaggctgtagggccatgtgattgggcagttctcctgccgagaaaaaggggactgatgactttctgtcacttgggcatccagaaacctccttgaaggtggaggttattgagggaggaggcaggagtggaaaaatgctattggtttattcctgtgcttttatagaacagccgaaccattctatggcaataaaacagaatcacagggcaaggtgcagtggctcacacctgtcatcccagtattttgggaggctgaggcaggaggatcgcttgagcccaggagtttgagaccaaccttggcaacatagtgagaccttgtctctacccaaaaataaaaaaaaaaaatcagctgggcttggtggtgcacgcctgtagtcccatctcctcgggaggctgaggtgggaggatcgcttgaggctgggaggtgggagcttgcagtgagccatgatcacaccactgcactccagcctgggcaacagagtgagatcctatctcaaaaacaaacaaacaaaaaaggaacttgtttcctagcaagaagcagatgaggctggtgaataagcataccacataagtaagtaatccactaacttagggaatttcgtgaccagtcactcagcacgccctgttgcgaaggggacggctgaccaataggatcatctcagagtcaccctcacacaacttggcttagcctagttggcaaaagtgtctcttcagagacctaccctcctggaattgaaataaaatgaaaatttgtgatgacgatcagctactgtcagtgtgacttaggtgtagaaattaaaaaagaaaaaaagaccactctaaaggcatttgtgcatgaagacacctacagaaataaagccggggtgctgttcttggtcttcattcaggctagcacctctcgtcaccttttcactttggagctcagggcctggttcactcagcaagtgagcggctcacacagtagatgctctgcacatagtagtaggtactcagaatatagcagctgttgatgtacatgtttccagaggggccaacacaggaatctgcacgtgggtccttgctttaagcccagcccctctctgtgggcgtgggatggagtcttcctttcttggtgaccggcgccctctggggtcactggaggcctggacttccccactggcccagtgaccttgtttccttgttccctgtctcgcccagccttggctgtcctgggatttgaaaatctgggataaagcctttttcgggcctctaaggccctgctggttctgcgtgttccagagagctgcacctctgggtggtgagctggcctttttggcatttgatttatgtatagccctgagtcactgggagcggatctagagtccaggccagtgactgatttcaaacgctaacactcttggctcgggctcaggtttcaagtcagcctccaaaggggatgtttgctcatttcgtcatcttcctatcacagcaattttcgtcatatggaggggtggcactcatgtaccttgatgattattattcttttaaaaaatgaagttatttatgttatggggtgagttcgtcacacagtccgaatgtggaatgttgccatccttttcatcccaatcctgccagtgatttctgtttacaatagaactattgacattgtatggggatgaaactagcatgagatagtaattgttggcttgcctgagattttcatcatatgtacacatagacaaaacctggctttagttcctaaagctattgctgtttattgtacttttattagccaatgttacagatccccgtagcatgccagaggctattaagaaatacaggggtcgggggcaggaacgaagtccctggccatggatcatgcaattgatctatagttatttttttttctttttctttaatttttttttgaaattttaaattattattattactgttttttgcgatggagtttcactcttgttgcccaggctggagtgcaatggcatgatctccccctcccaggttcaagcgattttcctgcctcagcttccggagtagctgggattataggcgcctgctaccatacctggctaatttttgtatttttagtagagatggggtttcaccatgttggccaggctggtcttgaactcttgacctcaagtgatccaccgacctcgacctcccaaagtgctgggattacaggtgtgagccaccatgcccggcccaaattattattattttttataagataggatcttatcacacaggctggactgcagtggtgcaatcatagctcactacaacttccaacttttgggctcaggtgatcctcccacctcagcctcctgagtagctgggacagcaggtacatgccaccatgccaggctaagttttaaaattttattttgctagggggtctcgctgacttgcccaggctggtcgtgaactcctggccacaagtgatcttcctgccttggcctcccaaagtgctgggattataggtgtgagccatgcttttggccaatttttagttattgtggatacataatagttgtacatattcatggagtacttgtgatgttttggtgtaagcatacaatgtgtaatgatcaagtcaaggtaattgggatatatacttatagttagcctacagtcttattgataatgttctcagaaatttctgattccagagctccttgctcctctcccataattagataacgtgtttttctgtccggtaattgctgtagtactcatttttagatggggtagggaaggccatgtgccatgttggggcctcatcccaaagaccttgtgctgtttgggacaggtaattatttaaagccccgtgtgaggtgggtgggtgttaaactcatgctctccacaccttcccagagtgcctgggaaagcaggcttctctaagaaagtggaatagcgaataggcagtgatccctgagagagatacataatgattgtcagtttcatggattacagataattccgtttaatgtcctctgtttttcctttttgcaaatttctatgcattatatagaacattgactttagcatagaaagtgctaattcttgatttggcactttaatggatatttacacagtgacaccataaacattggataaacagaggatttgttttaatgagatcttcagtgatttgaagccgtttcccccttgccttctggaatccccggctccagttctgcctggttttggtgatgctgtcacagtggagggctgactgcaggcctcgactgtgagccctcactcggccaccttttcatttcctcgctgggttccaggctctttgaagcactcgcctcctcccctccctgcatgtcctctgtagtgcctatttctgtgatttgcatatagcggaaatatttgttgaactgaattatttttacacacaagcctttcatgtggccaacattttgaggtctgtctcctttggcgggagtctgggaggaatcttccagttcactaagaagtgtttgatagcttcagggcaggcgtgccctgattggggctggatgccctgcctccatccagaggctctctggccaggaggggaatgaaccaagtgcccagattcccccctacaatgtttatgcagaggtgactgtcacctgccaatggtgacagtccaccagggaagtccagaaggcctttggattaaagctacaggagaggcaggtccccttgcagggtcagaaggggaagagagaagagagagagaaccaaaggtgggaggttcagctactcgggaggctgaggtgggaggatccctcaagcccaggaggtcaagtctgcagtgagctatgattgcaccactgctctccagcctgggcgacagagcgagaccctgtcccaaaaaataaaaaataaagatggaaagatgggaggattctccccaggaaggcccaggccgcagggtccccttgtccttaaaggccagctcagtgaggctacaggtccccttgccccagttccccgagcacagagcaggcatggcctcggacgacttcctctttgtgtctcgtggactactcaataaatattaatgttttccaaagatatcttgcccagctctccctgacgaggctgttggcttgaaggaataacaacactcgttgcactcacggaatattaagtctgtgccagggcctgttctgagctcatgacttgtgctactcggtctctccccacaagctcacagggcggatgctattttcaccgccgtttataggagaggaaactgaggcacagggtccttcagtgactggcccccatgagcaggcagcacatctggaattccagcctgtgcagcctggccccaggatccccatgcctctgtgggggacactctggaagtgacaggtgaggcacttctctggcctctctggatctcctgctggccctgaatgtgggtggttacccttttggggtgctgtcggtgcctcttagatgtctcagtgaccctacagggtctgccttccataggactgcctttttctttttttttgagacaggttctcactctcctgccaaggctggagtgcagtggcacaatctcacctcattgcaacctctgtctcctgggctcaagtgatcttcctaccccagcctcctgaatagctgggactataggtgtgcgccgccatgcccaactaatttttttttgtagtttttttggtagagatggggcttcactgtgttgcccaggctggtctcaatcttctgggttcaagtgatctgtccaccatggcttcccaaagtattgggattacaggtgtgagccactatgctcggccggcacccacctttttgtggacttttctttgttgacttggcattcggcaaggtgtaggcttttgccaccaacacgatacccgtggggagaagccccctggcccccgtgcctgccagaagaaaggcttagggtcccctgcgaggacccacacgtgcactgcatgcctggatagcccatgccagcctcactgaggctggatttagttcctgagtatgttatggagaagtgcccagagcagggaccgcaggcacaaggtgggcctggcctttggaggaggctgggcacggccacctgctcctcctctctcccatgggcaggttggccttgttgccattggaaactcttgagagcccacgggtgttttctggccatgtgacctaaatgggaggcttgctgaagggtagatgctgcttcaccagcaacaagaggagcccccagacctcagccacaggatggcccccaccctgctgagcccccactcttcgctccctgctcagcagagcaacacataccattgcccaaaggatggaccaggcacagcgtggggcccaatagcaaatgttctgacgaaggaggtcagtgccggacactgctgggcgttgttgagtcctgggctggcagggacagttttgcagggacggtttggaaggggctttgctggggagggggtctctaggaggggcagcccctgaatagggcagccgagttgctgtgactgcatcttcctttctttccgatgggggcaaaactcactcttctttttaaccattctctgttatctgtttttcttttcttttgaaactttttttttctttctttttttttagaaagaggatcttgctctgttgccaggctacagtgcagtggtgtgattatagttcactgaagtcttgatctcctgggctcaagcagtcctcctacctcagcctcctgagtagctgggactacaagtgtgagccaccatgcctggataatttttattttatttttttagagatagggtcttgctatgttgcccaggctggtcttgaactcctggcctcaggtgatcctcctgcctcggcctcccaaagtgctgggattacagacatgagccactgcacccggccatgtcctctttttctgattcgggaggataagggctccccatgacactggcatcagcattgggagcatttccgtgaccccagggctgctgatacaccctgtggacagggcaggacccacagctaagtcagtaaagcaccatcctctgggagtggctgtcatacgacatttcttgcttttaggaccattggactgaaaaaccaaatcctgccactggatctggtgatgacggtgacatttttttttttttttttttttgtttagaagcttatgattcatcggatctcttttggtttacggaaagcccagatgtcgtggtccctctgcgtgcccactccaggagaacgcattcaatgtcaaggaaccctgtagtgtgcaaagttggatttagggatttcccgaataaagctcactgagggtcaatgagttccataaacattattgaggccgggtgtggtggctcacgcctgtaatctcagcactttgtgaggctgaggtggggggatcacctgaggtcagaagttccagaccagccctgccaacatggcgaaaccccgtctctactaaaaatacaaaaatctgggtgtggtggcacattcctgtaattccagctactcgggaggctgaggcaggagaatctcttgaacccaggagacggaggttgtagtgagccgagatcgtgccactgcactccagcctgggtgacagagtgaggctccgtctccaaaaaaaaagaaaaaaaaattattgaatgtcttccttgtacctgacactgtgctttatcccatttaattccactggataatatgttaaattcagacttgttcgtagatttatatacatgtacatatccctcttaatacattggtttattctgtttctccatgttcataccgccagcctgatgcctcatttgcacaaatgaatggatgagtgaatccagcttattcttttatttctccctgggatctggtatacaagagatggttattttttaatttgagacagagtctcactctgtcacctaggctggagtgcggtggtgcaatctcagctcactgcagcccctgcctcctgggttcatgtgattctcatgccttagcctcctgagtagctgagattacaggtgcacaccactatacccagctaatttttgtatttttggtagagtcagcatttcaccatgatggccaggctggtcttgaactcttgacctcaagtgatccacctgcctcggcctcccaaagtgccggaattataggggtgagccaccacaccttgccaagagatggtcattaaagttgaattttggcactccttgcagaaaccctacaaagttggtatcacctctattttgcatatcagaaaactgatgctggccaggtgcagtgactcatgcctgtaatcttagcactttgggaagctgaggcaggaggattgcttgaggtcaagggttcaagaccagcctgggcaacataaccagaccccgtctctacaagaaaattaaaaaatgagttggatgtgtacctgtgatcccagatacttaggaggctgaggtgggaggattggttgagtcctggagtttaaggctgcagtgagctatgattgcaccactaaattccaacctgggcaatggagcaagaccctgtctcaaaaaaaaaaaaaaaaaaagtgctgagagagatcgtttcccgagggtctttggatagtttgtagaaaaacagtactgttccttctaaagccctgtggctttttccctattccaggtgcacattggcctttgaggctggaaaacacttttacttacttccagctttatgggattcataaaatggccttgagaaaagtaaaccgatttttctccttctaaaaacatccagtgggccgggtgcagtggttcacacctgtcatcccaacactttgggaggccgaggccggcggatcacttgaggtcaggggtttgagaccagcctggccagcatggtggaaccccatttctactaaaaatacaaaaaattagctgggcctggtggtgagcacctgtaatcccagctactcaggaggctgaggcaggagaattgcttgaacctgggaggtggaggttgcagtcaggcgagatcacaccgctgcactccagcctgggcgacagagcaagactatatctcaaaaaataaataaacaaataaatacatctggtgcaggtaaagtgttcaggaagtaatttcctggaagagggaactctgcagttgcaaatgcggccttcttacaagtcgcttgtagggtgttgaaactctctcgcgatcccagtgacttgagatgctctgttttctggataactaagcttttccaccttcactacggggtaccagggtctttgtagcagagaggcagctgtcttgatggtggaaccactcccgccagtgtgtggtggggtgcccccggggatttagggagagagaaggccagtggcagggactggctggaggaagagggtgcgaggaaaaacactggctgacatttgaaggaacgtgcttcagtatcagggaaggccagcgtgggataatcggtgtcttggcagatggggttgacggggagccctgaagccggcagtgtttagagattcaaagaataggggggctgtggggagtcttttggttcacagcagtgtcccccaaaccggcacagtgggatgagagtgggctggccagggaaggggacagggtgttaggtccagaggtgctaaaatccccaaccatggtcaaaatggggacatgagagactcggggttcagagctcacatgaaggacagctgtccccccctccacccccgccttgggtcagagctggctaggagagcccaccctgcagcctgtccttcgtgggaatcagcatgaggggtgcaaagtgctcagcaaggcccggcaccaggtttgttcttgggatcagagtgatacacgcgccttacattttttttaagctgctggttttgcgggtcagtacggggaaaaacggtgagtcccttttataaaatatatagagaggttggtgcgaaaatagcagcttgtttctgcttgcgtatttctactcactgctgggacacaaatctacccttccattttctgaattgtattcattcaaactctgatttaacctctatttagttaatgaattgggcaagttaacctcgaactcttccaggctgtggctgttaccgtcaccatctcctgcttctcactttacacactcatatgagaccttttttatttctgaagtgtggcctgacattgtttaggctgttgtttggtgcttatttttaactcttcttttgtcacttaagtaggatgtcttaattcttgtttagtgttagatcacttagcaggattttttttttgagcgggggcggggggaatatgattttgtgtcacattttgaatacttctctatggcagtatcttttagagttattatggaccctgtaattctgttctcaaagacgtttaaccactagaggtagacaccaaaaatgttttatttgtctcatttgggactctaattcagtgaagttggctgtttggagtctgagactggatctgtttttttattttgttttgttgttgttttgtttgttttcagacagggtcttgctcttctgcccaggctggagtgcagtggtttgatcacaagtcactgtggcctctaacttacatgcttaagcaatcctcacgcctcagactcccgagtagctgggaccacaggtgctcaccaccaggcccagctgacttttgtattttttctagagacaaggcctcataagtagttgtttcccaggctggtctcaaactcctgggctcaagtgatcctcctgcctcagcctccccaaagtgctaggattataggcataagccctcacacccagccaggactggatcccttgactcacttaatgatcggggtttacttctgacctgcatggggtgctgtggggaacccagagatcaataagacagcccgtaccttcttggagctgtatttagcagggtcatagaagacgcactcataatcagaaaccatccagaatgtgacttctggccagggagaatagggaagggttcatggagatggtggcatttgattgaattctgaatttggggttgtaggtttcaaatattagtttggggacagtcatccttttattttcttctctaaatttaaagaaattgttatttttaaaaaccaattggaatgggtattgaatttctgtgtggagaatgtctaccagtttttcatcattttctccactgtatagtgtcaataagtgttaaatgcaatggtctgtaagactttgttgataattttcttttctttgacatagacttgtaaactggaaaccctgtgtgggtaatgggcagtgcctatttcagcatcttgtccccagaaatccactccctaaaaggcttgttgaatgaatcagatctaggagcatctcttttgtgttggagcggagagtcagtccggactttgagcctctccttgcactgaccagcggcaggctgaagacagttggacttaagaaaacttaatctagaagcaatatgctggtcagattctttcaatgctaggtttagtatcgttcctttttctcccatttggtgaagtggtgtaatgctttagcacattttaaataagattacacaagcggctgttagttggcatcaagaatcttttaatctggaaagaaaatgttacctccttcatttgcaaaacagagtgtttctggcaccgtatcccaaagtgtcttctggttgttccgtttttcagaagttactgtgggcttctaattaccctcatttagacatccaggacagaaattgccacttcaacaagaaaattttgtaatgagccggaggaaatggtctcatcattactacgttatacgcagtctgagagtctgcgtggatttttatttcacaagaatgtgactgtttaattgaaaaatgttgttaaaatgtgctttctgttcctatcagtatgttgttagtgcttatatagccatgctcgagtcagtgaaaattggtgccctttgccaaaatactttttttcatttttgtgtataattttgtgagctaggtctatttttgtttaattaggccctgcaagagaatgagggagagctgtatttaaatttttagaccattaaagggcctaaaactatcctagatgaaaggcccccaaaattagctttaatatttattatatgaataaaaccaatagggaaaacgtttccagaaaccctttctctttttccttcttcagacagctggctaagattaattgcaggcctgaacgtgggcatgtttgctagtttctcttgttctattactagaaaataactcttaagagaggagagaaataccgtcttcttgtatttggggggcaggctgtacattttataactcactaatataatgaaatgtttgttgataacatcatattttgctttctgatagaaaagtcctaatttctattttctttttactttttatttttattactttttttttttttttttttttttttttaaaatagagatgagggcttgctgtgttgcccaggctggtctcgaactcctgggcttaagcaaccctcctacctcagcctcccaaagtgctgggattacaggcatgagcaactgcgcctggcaagtttgttttactttttatttttattactttttgtttctaatttctactttcgacaggattccttttaaaattttaatctaggaaacaaaactgcacgtgaaagatttgccttgtagacggaaagttctggaaacatcagctccaggctgtggtgtgaagctgtcgggctgatttgcctggtaagaagcgcgtttggggcacggagggtcaccttgccccctgcgagcgttctttcatcatttgagcagccaagcatcccttttgggccaagtttgccaaagactctaacgtagagaagtggacagacccagttgcatgctgatgttaggggcagagagaaagaaggaaagatccttgcctagcttaagcccttgtgcttcttccccacatttatttgacttcccaaattggattggctgttgtgattgaaaagattgtcagcactatgtaaatgagaatgagaagtaaaagtgcatctcatgcagataatttctatgtagataatttgccataaaaatttatattgcagtccttaaaaccttcggagatttagtctgtctagggaaaggtgatttatacggcattaaaacactttttatgtcccagtcctttagatttaatgtttattgcctataaaaatgaaatcttcttgtggatatttaaaagttttggtactgtgtgaaatatatattcaagttagaaatgctttggagatgttgtaaataagtggcaaatctcttgctccaaagtccactgtgttgtctgggcccgcatcttggctttgcacgcctgaaaagctgcctcgggtaccggtgtctgatcatcaccatagtgggtcgccaagtaggagaatgtcttatgtagggatttggtggtttttcaaaaaacttaaattagctaacaaggatgggactattataattcctcagaaagttatgcaaggtctgaccagaatttcattccaatctgcagaaagactgaattatggtgcagtttttttggttttttgtttgtttgttttttgagacggagtctcgctctgtcgcccaggctggagtgcagcggcacgatctcggctcactgcaagctccgcctcctgggttcacgctattctgcctcagcctcccaagacgctgggattacaggcgcccaccaccacacttggataattttttgtatttttagtagagatgggatttcgccgtgttggccaggctggtctcaaactcctgacctcaggtgatccacccgcctcggcctcccaaagtgctgggattacaggcgtgagcccctgcgcccggcctatggcgcaggttttaaagagtggaagtgctttgacaatggaatgcccagtacaaagcagtttttaggcttttgcagccactcagattcataacagcacgcttcaattctggtcttaaataaaactctcatggagtaaataaatcatatggtggggacagcactgctgtggaggagggtactgtttaagcattttgggggttcctgaaagatgtttctcaaagtgagcgctggagaggagtacctggtttgattgttgaactaaagtgtggtttctgtaaccctagggagttcttccctaggtatgattgagctccctgagtgctgggatggtgacctccccagcctgtctccaagtctgagtactggtcggcttcctagactccttaaaacgctgggtattttatttaattaatttatttatttttgagatggagtcttgctgtgtcgcccaggctggagtgcagtggtgcgatcttggctcactgcaacctctgcctcctgggttcaagcagttctcccgtctcagcctcctgagtagctgggattacaggcatgcaccaccacgcctggctaatttttgtatttttagtagagacggggtttcgccattttggccaggctggtcttgaactcctgacctcaaacactgggtattttggaaatcatgtgggaagtgcttttcctagagttttgtagctcctcaaaaaggcagaactaatcaaccaggcttccccattgtagccacagttggatcccaatggtaagggccattgggaaaccaatggtctgggtgagtctggcctgggaccctggcatggggaagagactggacttgaaggctttggatgggcagcttggtctggacagtattggaaataaaggaacttgagactttgaaattgctgtgatgggggtgttctcacctgtccataggggtgggatgtcagtaagctttgccggtgtctgtcccatagatagactcagctctgcattgcagccccaaaaggagcctgcattcttaaaagaattttaggggaagaaagatttaagagagcacctgaagtcctgaatcccttcagaaggaattcatggctgcctgtagtcagctgccagtccaaccttgccctccaaaagaagtcacagagattgagttttcagcgaggcagggagaagttgtcacatttgcctaattcttgtagaggtgagagtgggagtaaactggaagggggcggattattggtgatttgggggccacgtttccttgtatcacctgtaaagttttttttttgtttttgttttttttttttttttttggagacagggtcttactctgtcatgcaggctggagtgcagcggcacaatcacggctaattgcggcctcaacctccccagactcccaagtagctgggactataggcatgcaccactgcacttggcgtatttatttatttatttattattttttcgaagagacagggtctccttatgttgcccaggctgttctcaaactcctgaagcaatccgcccacctcagcctcccaaagtgctgggattacaggtgtgagccaccatgcctggctcacccataaaattaaaatgaaaagagcagaccacagccagcagtcttccgacctccagctcttgcaggtcgtgggcagccttgccccaggtgcagcaggtaggccaggaagcaggtgtgggaacagagcaacagcaggcaccgtggggacatgcacagtaagcgtcgaatcggtgtgcgtttgcagaaacgtgaatgggtgaatgaaggggtgtatgaaggtatacacaggaacgccacagtcagctttgtgtaaagtagaccagtgaacagattgctggtattgcttctgacagctctgctcctcaggggaaaatggtgaactcactttagaactcgcctttgtcagctccaactagactctggaaggaacacaaatgctcagactttcccatgacagactgtgaagcaaagccagttacacagctaccgtcactaatatttttggtataaagcagttgctaaaattaattccagtctgaaacttgatgaattctcagtcatggaattaacaggtcttaaatgggaaaaataaaaaattagcttgattaaaaataaatgtttgtgctgaaatgtggagcctgtctgtccctaacaaactaaatatgaagtttttcatcttagaggatttgtttgcctttgagtattcatagggaaagtgcacgtttgtaccagaaatttagagacgcactcccagtaagttcttacgagcagtcagtattatcctttttgtataaggcaagcagtcagtccctatgaagagtaagatacaagcctggctcagcagtggcccccctgagcctatctgatgtgcagaaaagtcacgcacacacaactgtcttgaagggcagcctcctttcagccagcacccatttactccctcttattaggccttcctctgaatttatatcaagcaaactatttaggacgcatctgcgaagcaggaagtgtgtttcattttgtttttaatgaggtttcaaactctctcttcccatctctgtccctggatgacagcgcagagttttacgtcatttgctattagacatcttgtggcttgacatcctcgaaggctcagccacccctgggtgtgtttggttaatacagcaagtgaagcctgggcaacatatcgaggcctcatttctacagaaatttttaaaaagtagctgggcatggtggcatgcacctgtcgtgtcagctacttgaaaggctgaggtggaaggattgcttgagcccaggagttcaagcccgcagtgagctatgatcgtgccactgtactccagcctgagtgaagggcgagatgttgtctcttaaaaaaaaaaaataataataataaaataaagaaaagaaaaaagtagaggttctgtgcttagttagaagatatctaacaacacaattggttagactttcataattatttctgctgatgtaagtatcacagcgcaggtcatgggcaacagtttactgttttcacacccagcttcaatgttaaatgaaccccagactatagcgtgaccagtctgatattatcatccccaaatctttatagtttcagctcttgggatggatgactgaataaccattttttttccagtgtggtagtcttagggttttgcttattggtgtgtgtgtttcaagaggaacctctgttccttggacttgatgtgagtggcaagtcatgtaaaaagctggattttatcaatagtttttgtctaaaaaccaaaaccaaaaaattcttcccctgcagtaccagtgcttgaaataaaccaccctcctacccccacccagcttgcctgcgtggatccagtagcacccccggtaccccggtgggcctttttggcagccccgaggggtcagggatctagggggaagagtcaccgcagggagcgcagatgtacttggagtggggaatggttgggggggacccattcccctgctttaaaccgcaaatgtcttttgatatctagtaaaattggcaagcagaatgattgaaaacatgtgagaggtaactggatctaagtctcaagtagtacatatttgagaagttttccccaatgtaaaagtcactctttaagagccttaaactaataaaaacaaggaaattccatgttacggctgccactcggccttttcatttttattccagaagtcagatctgacaggtcagcagctcactggctctgggctccccgtgtttaaagcagtggggacgaggagaagaactggcagccgccgggacggggaagtctccaatgccattcagtgccaggctcgtaattccctcttagtttatcctattttctcttcttggggcggcttcctgtatgtactttattcactgaagctgcttcaggattccttcagagactattcttgtttctttccatttctgtgtctttttttttttttttttttttttgagacagagtcttgccctgtggcctgggctggagtgcagcggcgcgaccttggctcactgcaacctccgcctcccgggttcaagtgattctcctgcgtcagcctcctgagtagctgggattacaggcacgcaccaccacacctggctaatatttatatttttagtagagacagggttttgccatgttggccaggccagtctcgaactcctgaccacaggtgatctgcctgcttcggccccccacagtgctgggattacaaagcataagccaccgcacccggctaatttcctttatagttacactagcttggaagaataacatactgagtggcgtggaaggcgttggtgcacataggtgcagcatcccagagccccgtccactggcggctatttgtgcatggctgcctgtggcttcttatctgtgatggaacctcgtgggcagagaagtggctggagagcatcaccaaggctgcctggtccaagttgcttcctgttgctgcatgggcagtgttctggggtccagaccctgggtggtagtgataagatggtgatggggtggagtgggtccttatagatcccacattactgagcggccttttgcccttcaaaccagatcacaatcccctccctgccagttggtcctcaagaaatcacaggaggctgggcgcagtggctcacgcctgtaatcccagcactttgggaggccaaagcaggtggatcacttgaggtcaggagttcgagaccagcctggtcaacatggcaaaacccggtctctactaaaaatacaaaaaaaattagccaggtgtggtggtgcactcttgtgatcccagctactcgggaggctgagacaggagaatctcttgaacccaggaggcagaggttgcagtgagtcaagattggattgtgccactgcactccagtctgagtgattctgtctcaaaaaaataaaaaaataaagaagtcacaggaggcccagcatacagagaacatcaggtatagagagatgtccttcctgggccaaaacaggtggtgtcattttgctgagtttgatagagaaaaagtcctgatgtctgtgtacataagaactcacgtctagagttcgagaaaaaccggtgatgagaacttgaacttggaggagtcacagggggatcaggaaagcttggtaattggcatgaatttcctacctccaggggcctggcacagagacctaggatgaagagggggccatcgagcatggtgtgaacttggagagtgtggggagctgccccagccgagggcactggatgggaattcatgccagaaccccatcacatagcggcaggagctgtaattgtgcttcttaattgtgtatcttcatttagtgcgagtttaggtggttagcaatagctctttagctagctttacagagtctaagttaaagagcccctcagctatcttgtagaaagcgccctggacaggatggggtgatgctgacagctggagtcactgttccagcgcccagaatggggagactagcagcacttctgggcagcccatgaagcagcctcttccctctgccggtgtccctcatgtccagcagagctagaagtgaaactcactgaggattgacgcggcccctttaaaatcgcatctccgctcttggcaccaggagctgtcatgtagtgtaacctgttggtgcccagaacccaggtttcctggtggcagccagcggtaccggtgccaggaggcagcgaaggaatcacttgcgacgcccgctctctctgccatacgagtgtcgttctgcggggccatctggctggcagcagctctcagccaatggcaggatgttgtaaacctcactcgctgaatgcggcaccgaaaatcttgaaaattaactgcaaaaataaaatcaaagctggctccgagatggtatttcttggcctggcataagctctccggatgaacttgctctgccttgttgatagatgcctcttactagtttggttttttcccaggagccagttggcatcttttaacttttccttgtaaaatccaggcagaaacattttgagagctttctggagtttttatttgctaattaaaatgtgagaagggaacacagccacaggtagaggtctagtgcaagccacagctgtgattcagaagaagaaaaaaaaaagccaaacctgacagtttcaaaatgaagttattagcacttcacctataactgtgatagcttttaacttgcaggatccttctcttaggcaccacctcccatccgaaccccagagcatatgggaaaaggagctaatgtgtgtaagttgcaggatacttaatcactgaagaatctaacaatgataactactatctctctggaacttttttttaacttagaagagtatgtcttgttctgtttatatatcacatagttttccaacgaccctgggaggtgaggtaggtggtatattttaccaatgggaaaatcgatgctcaggaagtcttggtgacttgctcaagttcccataacaagaagctgctgaatccaggatggaacctggtctaccccaaatgcccctactgcttcctagggcccagtaatgcccctgggtagggcgggcccagctctggaagaaacagggctatacaaaaaatcacccaatattgggtcaccagccttcttctacttgcaaaataattaagcaaaatctgtttttatttgtttttgagacggagtcttgctttgtcgcccaggttagagtgcagtggtgtgaacttggttcactgcaacctccgcccctagggttctagcgattctcctgcctcagcctcccgagtaactgggattacagacttgcaccaccacgcccggctatttttttgtatttttaatagagacagggttttgccatgttggccaggctggtctcgaactcctgacctcaggtgatccacctgcctcggcctcccaaagtgcgggggttacaggtgtgagccactgtgcctggccacaaaatctattttaattctgcaagttataagcagccagtggcccaccaggcccagctgtacgttcccagggaccccccaaagcgtatatgtcccgggcacacacacactaggtggtttgttttgttccccagcagcccgtgtctgcccgggcagatgttagtggctgagaaaccccaacagggagtgagccacaggcccgcgggtggcttccctgccagtgttctcctcgcgaaggggaagggagcccttgccagaatggctggtgccctaacaaattgattcctgccaaacaatagaaataaatattttcagcagacagaaatgttggctctgaaagcattcaaattaaaggcttatttctgaaacaaatactttaggaggaaaacatttttaccagcgcagatgagatcagagctattccttttggcagtggcaggactattttgagactcagccacaacggtttccctgccccgtctcgtttttcactgatgacctcgccccctgtttcatggagacagggaattgcattcagctagaggcatggggaagagatggtggcatggtgttctgcagagagcctcagttggacagtcggccgaatctggattcaaatccaggccctacctctcctgctatgatttcgacaaagccggtcagtcatctgatcatcagcttcctcagtctgtgaaatggggcggtacctcccttgcaatggttaatagcgttatcctcaggacctgggggtcattggaggccagcactgtccctagaactctctgtgttgattaaatggtctctacccgccccagcaaatataattgccactagctacatgtaactgttgggcccttgaagtatggcagctggaatggagggaacaaattttaaatttaacttagatgaaatgtaatccacatgtggccactggctaccattttggatagtgcagttcccattcatccctctcatttcattagttggtccctggagccaattaattggttggagggtcaacccactacaaatctcccaagtctttctctgtgccggatgcagctgtgcggagttgggacctgtctgttgtctttgacatccgtcttctgtcctgcagacggagcagtggggcagtgccatcgagctgggcagaggaattaatatcttagccatcaactgcccaaatcaaccttcatgggcatcttttaattttctaagagatggggtcttgctgtgttgtccaggcaggactcgtgggctctttccgcctcagcctcccgagtagctgggactacagttgtgcaccaccacacccctctgatatttcttaattttaatggctgatgtttcttaattttaacaagttcccatatgtctcatgatgtatgctaagtataaaaagaataatagaaggcatgaagtcaaggggcctgtttcccgggcatttgtttcagtggtgagtcacattcatgcgaagcctcggtttccttatctgtaagaccagatcagcaaaccacctgtggctgcctctctccctggttgaccccgaggccaagaggaggggcagggtcagcagccggccagacctcagtagcccctccccatcctggtatgggggaacacaggaggtagaaaacaagtgacctacacaaggcgggtggtggcgggggaggtcccactttaacaggaggcaagatggccgggagaaagctatggggaacccaggcaaatggagatgagcagaccccaagaaccgtaccctagggggctggctgggtcgggggaattagggtcctttgggctccttgcagagccgaagattgtagtggggagcactgcgtgtgcctacaaggctgagcctggcaggcagaattatgtgttgttttgagataacagccacaacagagcagtaaagaatactgcttataaaacggacatttttttgtagctcaaaaatggtcaaatatcagtaatgtcatgtggtttgagtaatccataaagcagagcccttctcgttagggctgagaattatcctcccctctccctgccacagagccggccacgtggcctgccccggcacctgctccgccttacatgtcattatgcgtctccgagacagcgtctctcacatctcaccgtttaaatgagcgtctagcaagtattctatggagtgcaatgcttgttggatacatctggcattttcatcttcgcagagtgggtttgtgacggggtgaaaaacaaaaaaacaaattcttgattcttgatggaaatctctcagtcctgagagatttataaaaaaggcttgtaggaaaactttgtacgcgtagcttttatactcatagaccaaattataattttttattcaatcttattttctgaataggtaacgtgttcacttggtctaaaatcaaaattttagccaggtccggtcactcgcacctgtaatggcagtactttgggaggctgaggtggggggcggtcacttgagctcaggagtaacatggcaaaaccgtgtctttacaaaacacacacacacacacacacacacacacacacattagctggacatggtggcacgcgcccgtaatcccagctactcagatggctgaggcgggaggattgcttgagcccaggagttcgaggctgcagtaaactgtgattgcatcactgcactccagcctgggtaacacagtgagaccctgtctccaaaaaaataaaatttgtatgtttatatactgagaaattttgtctccgcctctgtccctttttacccctactgtctaccctaagtcagtactgtacttctgttcattttctgggggtgtgctgaacagattcaagagaatagcatttccatggaaaggccgcagcttgtaagtttcacttgaatttccgtgattgggagttaatatcaaatgatctctcagaatcaagaaatactgatacatatcaaatgtataataacattttgagaattttttttttttttttttcagacagagtctcactctgttgcccaggctggagtgtagtggtgtgatcttggctcactgcaacctctgcctcccgggttcaagcgattctcctgcctcagcctcccaagtagctgagattgcaggcgcccaccaccacacccagctaatttttgtatttttagtagagatggggtttcaccatgttggccaggctggtctcaaagtcctgacctcaggtgatccccctgccttgccctcccaaagtgctgggattacaggcgtgagccactgcgcctggccccattttgagaattaaaggaacatgggcacgtaatctttatacgaggtggagtcagattgaatagcaagaggaagagaaactgacatccacgctcattgcactgggcgttttatgtgacttaatcctcatagcagctctatgaagtatgtatcagagggtgtccccattttacattaaatcacttgcctggatcactcagctggggagggtgagagccaggtgacctacccaaggctgtgtctctgggtggggggctcagaacctctctccctcgttttgtagtagccagacattgtctcgtataaactatggcaactggaagtgaaccaggtcttttcctgccctctgattttggtggaaaatgtgacctacccaggaaaagcactatgattttaggagtttaggtgcacaaagctgttttccaagcatgctcattcttctcccaatttgggactcattgctgcctctctgccctcatctgtggggccaagggagctggagcgacagccacagcagaccgctctgcatccctgtatgcgttgtgggaaacagcagaggaggtggcgttgcgcccatcttacagactccagattctgttcacccgacaggcagtgggaatccgtgttcacgctggtcccttggatcagaaattcagtacccttccctccacaccatgctgtagacacctctttcctctcctagacccggaacatcctctcttcttcagggtactggggaccaagatccaccctcgtggtgagaaaaccacaccataaataaacacagccaccatacgccgtgagatctggccaagaggtttccttctgttcattcggccctaatctccaagatgggaaggcattgccagctgccctgtgtagagattcctgaacacgcagtgtttcttattaacccgccagataaccagaaaatcagtctttgggcaagcgcttgcttctccacgtgcccagtattttctttctttctttttatttttttaatgagacagggtcttgctctgtcgcccaggctgggctcgaacttctggcctgaagtgatcctcccacctcagcctcccaaatagctgggactacaggtgtgcgccaccatgcccagctaacttttttttttttttctggagagacagggtgttactatgtggcccaagctggtctcaaagtactgggctcaagtgatccccccacctcggccttccaaagtgttgggattacaggtgtgagccactgtggccagctattctttaatttactagcgctgactacatgcctgtgatgtccccaggaccctgcaaagttctgggaaattcatagtgagcaaaacacagtccttgctggagttcacagcccatggggagacggcaccaaccctgtgcccagactaggggagctgccacgcagccactcactgagctgggcacacaggttcccatctcttatgaggtgaggcaggaggagcagggagggagctggggaagtggcatcagaacattttttggaagagagaaaggaaaggtttccaagcagaaggaacagcctgtggcgaggtccgaggggaaaggaggggaccctgttctctggggacactaggggaacgtcagcatgccaggtcagggttctggggagccctgggtggtcttatcgatggcccccaggaagccacagaaggcatttgagcagggaacgccaagctcacggcgggctttggcagggcgcgccccgtgtcctggaggactgtgtcctggtcatctttctaggcccccactgcatgcccttgaggactaggaagggtgcctccttctctgcatcaggctgactcctagcagctgccgtatctccagctttcctgctttcaactatgctttttgtctccttttcctcattgcgagcctaggcctgtatggggtggtggagtgggtgggagctcactgcttaggtgggtgggcagtgtgggtggtggtggttccatgggtctctccctcccactgtcccatctttgccactcatctgctgccccccactcccggaccccttttggaggtcagtctcactctgtggaaaccctggcttcctggttcgagatgccccctctggcccacgtgtctgacatcacgtaccagaacactgtggccatcattcaggattttttatgacacagtagtgaatcaaagcctgtcagtgggaaagtgatggggaaggattaagtgtctgagaacatttgggaaatatgaggttagacctggttctcaaacttatgaaataagtgaaaacatgaacgttcactttgggaattctgcaagattctcctttaaatggagtccatgaagagaacaaaatgaattttctgcagcgttacgcaggagcacttttctggaaatgaggtttcctaggactttgtcagcccttcaaagcctaggtctccttactagaggggaagaaatgagattttatttatttttatttttattttttattttttgagaccagagtctcactctgtttcccaggctggagtgcaatggcacaatctcggctcattgcaacctccgcccccagggttcaagcgattctcatgtctcagcctcccgaatagctgggattacaggtgtacgtcaccacacccggctaatttttgtatttttagtagagacagggtttcaccatgttggcctggctggtttcgaacttctgacctcaggtgatccacctgctccagcctcccaaagttctgggattacaggtgtgagtcacccactggccacaaacttatgaaataagcaaaaacatgaactttaactttaggaatctacaaggttctcctttaaatggagcccacgaagagaacaaatgaactttctgcaaatgagatgtcctaagaccttgtcagcccttcaaagcctaggtctcattactggaggggaaaaaataagattttaaaatatcaatgtttagccagactcagtggcttacccctgtaaccccagcactttgaggaggctgaggtgggaggatcgcctgagcccaggaattcgagaccagccaggacaacatagcaagacttccatctattaaagaaaaaaaaaaccatcgtttacttttaggagtaggcattacatttacgtgcttaaaataccaaaggtacccaagtgtagatatgaaagactttcccacccccaagtgagtgcccagccccttaatttccctccctggtatggatactaccagtatcttatgtttgtagaaccttctacagaaccttgtgtaggtagaagcagattctatgcatctatgtgtatctgtgtatttgcagtgactagattgattgctgttgatggacatattctggggaggtgtttttacacttccattactgagcacaggctcacaggatggcactttcccgcatgcaccaccatgcctggctgatttttgtatttttagtagagacagggtttcgccatattggccaggctggtctggaactcctgacctcaggtgatttgctcgcctcggcctcccaaagtgctgggattacgggcgtgaaccactgcgcccagcctgttttttgtttgtttgtttgtttgtttgtttgtttgtttttgaatagagacagagtttcactgtgttggccaggctggttttgaactcctgacctcaggtgatccacccacctcagccttccaaagtgctgggattacaggtgtgagccaccatgcctggcctcaatttctcccttttctaagccccccacctctgtttttgtcccatggtctggtcctgtcggccttgttgcacctggcagtcagggttgacttatgatttacttgaaccatccctggagcccctggcctggtgggggatgctggtggcagaatgaattcgggtctgaggtcaagcatgtgtctgtgagagtacacaaaatgaactgtgatgtagcgtttactgtgccacaaacttgaaatgcatcatcttgattatgtccagagaaaggaagtcatttgaccacagccacacaggttacaatggggatgcggcctggagtccaggtgtgagctaccacacccagcccacatacactttaaagatgagcaaatccaggctgtaatcccagcacttagggaggctgaggtgggaggatcacttgaggccaggagtccagtcaggtttgggaggccgagacaagaggatcgcttgagcccaggagtccagtttaggtttggtaggctgaggcgggaggatcgcttgaggccaggagtccagttcaggtttgggaggccgaggcgggaggatctcttgaggccaggagtccagttcaggtttgggaggccgaggcgggaggatctcttgaggccaggagtccagttcaggtttgggaggccgaggcgggaggatctcttgaggccaggagtccagttcaggtttgggaggccgaggtgggaaaattgcttgaggccaggactccagtttagacaccactgtttgaagcgtcttgggatgttttcagtaggggacttggagaagtgatggaaagaggctggtgggtggggcttaggcccaccacccctttctagccagagaaccctccattcatcgaaatgattctgttgttggaaatgaaacaaaaaataaaatggtcttaggaccttcctgtgcaggaaccatggccgacctttccctttttgtacaagtgatctatttttttcactagcaaaaccatttaagatttctatataggatgtgctgtttgattagtttgacagataatcccccaagaaacatcagatgaactcactctttggattaaagtttgagataataaaacaagaatacttgtgttgctgatgtggccagcccaagtatgtttttcccaccagcccagaggttctgggggcaggaggcatcctttgcaggcctagaaggacccaccctgtgggagcctggccctgtgcatctgcagagagcacttgctggaaatctcagtgggaaatggtggggatgcctcccatacccccactttaaaacaaacaactgacaattacacttttttttttgagacagagtctcgctctgctgcccaggctgaagtgcggtggcaccatctcagctcactgcaacctccgcctcccgagttcaagcgattctcctgcctcagcctctcaagtagctgggattacagatgcacaccaccatgcccagctaattttttgtatttttagtagagatggggtttcaccatgatggccaagctggtttcgaactcctgacaattatactttttgagacagggtctccctctgtcacccaggctggagcacagtggcttgattatgactcactgcagccttgacctcctgggctcaaacgatcctcccgccttagccccccaagtagctggaaccacaggcacccaccaccgtgtccagctaatttttgtattttttgtagagatggggttttgccatgttggcaggctggtctcaaactcctgggctcaagcgatctgcctgcctagacctcccaaagtgctagaattacaggcatcatccactgttcccggcccacatacactttaaaggtgaacaaatccaagccaggcatggtggcttatgcctgtaattccgcactttggcaggccaaggcgggcagatcgcttgaggccaggagttcaagactagtctggccaacaaggcgaaaccccctctctactaaaaacataaaaattagctgggcatagtggctcatgcctgtaatcccagcttctcaggaggctgggtcttgaaccctggaggtgaaggttaaccagtgagccgagatcacaccagcgcaccccagcctgggcgaccgagcaagactgtctcaaaaaaaaaaaaaaaagatgggcaaatccaaatggatctctggtgttatttaaatacttatttgggaaaaaaattttcccactatttctgttaagcagacagctggttacatggtagttttttaattttgtttttaataacatctgaaatgcctggcagaaagtctggagttgggggcagagagaaacttaaaatgttaggagctttgccctttgaggagctgtcagaattggagaaaaaacatcccagaaattgtaatcagtgaggaaaacaggattccagctatccacagcaccccagctgtacaccagcgtcacgggatgagggatgcctgtgtgcacgtaggccttggtttctgagctgagacagcagcagccaggccgacttggtgataggcttggcctgcccctgcagtggactgcctgggcctgggcctgggccttggccttggtctcagccctgtggtggatgatctgagccttggctttggccctccagtggatggcctgagccttggccttggccttggtcctgccgtggatgacctgagccttggtcttggccttggtcctgcggtggacgacctgagccctggccttggccttggccctccagtggatgacctgaaccttggccttggccttggccttggccctgccgtggatgacctgagccttggtcttggccttggtcctgcagtagacaacctgagccttggcaattggccttggccctccagtggatgacctgagccgtggccttggccttggttctgctgtggacgacctgagccttggccttgaccttggccctccagtggatgacctgagccttggcgttgaccttggcccgccagtggatgacctgagccttggcgttgaccttggcccgccagtggatgacctgagccttggccttgacctctgaagctcttctgtgcaagggtggggctcctgttggtgacacccacttgctgagtctacacctgggaagctcttggtcagctcggcccattgacttgagagaggaatagttgccgtccagcgagtgctgggggtgtaaggtggaccgggccacacggctgccaaggggccggctgggtgggactgaaacctgacccatgtgggtcctcattgcctcctgacatcagtcatcctgtgatctcttagaaagataaaaacacattttctgcgttctggtgcctctccttgccagacattttctcagtaaagtttctgtctcagcctcgttggaagtgccaggttctgagcccatcagtttgctgctagcctgccagcttcccatgacctgggacctgggaccaggggcccgcaggtgtttctagctggagaggagttctagatagttctgagcggataccctcctctgtcttcctcgggagagttctggcttggtttggtggtgttttctgtgaccagcagtggccaccgccaccaccaacccctcttccccctcccctcttcctccccctcccccctccctcctcctcctctatctccatacgccctgagactggccagtgggcagcatattgtgcaagaaacagctgttgttttgacaaaggacataactcgcctcacttcttgcatcaccagacccacgaggctctggattccaggcctctgcccctgcaggtggacacacagaccgtaacgcagaggctcacgtgtcccacactatgcattaccatttgtgtacgcactcgttcacatttagcaggattgtaaaaattaatagttagtgcagttcttccagctagataatgcatccaaatggcaagacagtccaaagatacacactatggagtaagtccctctccccaccggcccctctggagagagccaggcacggtcacaagtttcttctgtatccctctggagataatcacagcctatgcgagcatatggatggatattcttttaaacattgtgttgcggtttgctttttggcttggatgtatctgatgattatcatatcccttacaatacaccgtgtttttttacattacaggaaaatctgtgaggggctaaaccgacagggtattgctgggcatggaggaggttgggtccaggttttttgctctttgtgactttttaatgcctttcagatgtgacgactctccatacgccttctcacacgtgacccgtgactcatgggccgaggcctctgcatttgggacccccacctccacctccccaagatgcatttcattcccttgttaatgtgtcattgtagttgacgctttgaggataggcaggcttggtagataataaaacagtatttggcttatgtttaatcgctgtctcctcccacagcccgagaacgccttagcgtccttcagaaaggatttggtggtactggtttttatgtgtgtgtgtgttgttttttaaaaaaattttctccaagggacctggtcaaagatttcaagccttaaatctgatcaacccaatctggggcggcggcagctcagtctctcctcctcgctgtgccaatctgtttctgtggtggcgggtggcggctcggtgttaaatttggagacccccgtgggtttcccatgccgacctgcatatgtctgcgggcacggggaagggagggccgcagacccccgttgagtccccgactgccagcagcaagttgccgcaggcgcactggctctgcagccccgggatcaaggtgggttcaccttgcaccgggccacctgtttcagtttcctcctccaccaggcaggctctctgacagatcagcccagggaggggcaggtggggaccgagggggacggagggggcccacagacccccggctcatctggcatcttccccagcgtttcccacacttgacccactagatgagaagttgggggtcggggctgggaccccaccttcatacctccagcgcctgccaactcaaagacatcggtagatgcccaccgattgggtaaccgcccccagcacccccaccctgctaggcttccatgcagtgggggaagtagggacccccggccaaaagcagtcatgttctttttgtttttctcctaagttttctgcgtctgtgtgcgattggaacgaaacatcaactctttttttttcttttttgtcatatttcaatattggctttcttccccgccttctttcgaaggctccttttataacttcggctgctgctgcttaaatatagatgtcaaagccctcctccctccagattgtttatatttttgaagagccttctgcttcgctgtgactgctcctctcttatctgtatcccccgttccaccacattggtttcggttgctcttttttttttttccctgccttcccttaactgggatgtgtttcaaatgtggtctatcaaaatgttcagtgtttcccttttttctgcaatagctttgacatctgttcttgaattctagcccacgttattccttaggacttgtttgcccaagatgtgcctgaatgccagaaatactaaggggagaagagtgtggtgtggtggtatcttcccctcattgcctggtttgttgttttattgtcgttgttgtttttttttctttcctcccctgctttttaaagtgtctacgattccttccttcttccttccttccttccttccctccctccctccctccctccctctttccctccctccctccctctttccctccctccctccgtccttccctccctccgtccttccctccttccttccttccttcccttcttccttccttccttcctttcttctttctttcttttttcccttgggacacctcactcatgcccaggctggagtgcagtggcgtgatctcggctcactgcaacctctgcctccccggttcaagcgattctcttgcctcagcctcctgagtagctgggattacaggagcccaccaccatgcctggctaatttttgtatttttagtacagacagggtttctccatgttggccaggctggtctcaaactcctgacctcgggtgatccacccacctcggcctcccaaagtgctgggattacaggcgtgagccacctcgcccggcctgtccatgatttgtaagttgacagcatgatttcatcccatccggcatggcccaccccgtagtagtaccaaggaagcatttcccagcaagaacttgtaacgtgtaggtttgctggttaacttccgccaaggaggaaagcctgtgggacttggtgagctgggtggtggggggtggagaaggagaggctctagtgtgcttcttggaggcgtggggataaatcttcagctttgatttttctcgccgttcagctctgcttggactcagggtgatggtcccaaccgtgagaagccagctagagcagccaccttggatcccagcagaacgggccgctgtgtgtctttagttgccaaagcgactcggcaggaaaacaggccttttggtggcgacagcagtgtgtccttgggcgcctgctgtcagcctggaacaccattctggggccatctgctgcaggcttgttggaaacagatcctcttggcagctcttcccagaatttctgaggccagggcacaggttctctggcgcgttgattatcggtttgttgcggggagcagagcccagagtcctcagccccctagcgggtccctcatggggaacccactcctggtggtcctcagcgttcccgcgcaagtaatgtgatttgagaataactgccaatggtgcctcatttctgaaaagtggttggaaataattattcttggaatttaccttttaaaggtccctcttgaaaactaatcataggttaatggtctcgaacatgatgcttggcctagagtgagctcaccataaacatttgttgaatgaatacaaaccaagtattactctcagagatcccaggcccacagcattgaaggacggccacacggaatgccccgaggaggggatagatcagcagaaggactagagctcaggagagtggctggctggaaggaacccttgggaagaagaggcgtggagcaacttggggaggcgggtgctttgggcattagcctgatagttgtggctggagcaagaaagatgtttctgtgtattctgttatgggaacagagtcatttatggcgtgcacattgaggcacgacccatgatgttgaacgagcttggttttctcaaccacttcacatgggacggacgtgggatggggggataatgttcatttctctgccttcccgccaccctccagcccctcctctgccaatgagttgatgttccttagagccactggggtctctcccccagtgttctggtcaaatgcaaataggaccctcctctagtacacagtgcaattacaatctcacttttcctttcctgtttccccaacagagagaactcgatgccaccgcaacggtattggcgaaccggcaggatgaaagtgagcagtccagaaagcggcttatcgaacagagccgggagttcaagaagaacactccagaggtgaggcgcgtgaccatcgtgttcgctttgaagggatcttagaatgctggtgcatgttcaggcgacgctccgtgagcgtttcattttcatcagatgaacgcacggccggcaaacaacccgtttctttccccagatgtcttcagccccatttccagcagaacgcatgccatcctgcaggctgtggggatgtggaaattgataggttgtctggaaatatgaaagtcagagccaattccaggtgcagatactggacaagcttggtctgtaagaacacgtgggcaggtgtgtgggtgtctcagaccctcgagctcatcccagaccctgtcccatgtcagttagcaagccaccaaagtccataagggatcctgtggggtggaaggtccgcggggcctgcttccctgttgctggtgcaggcggagtgtctgaaggctgcacgcatctgggcatagcagtgcgcctaacgcttcttgtaaaacagacatttcgcctgctaggccttttaaatgcctctctgtttcttgaaatatgccgtaaagggcaatggaaatgtgctttttatatactcctgttttttctctcgtgagtgtgcaatcgggggacagtgttgagttgctggggtggcgtttttctgctcgtttcctggccccttcttccttcccttcaaccctatcaggggcttactaagaaaaaaaaaaaaacatccaagcgtgttgcaggcagatgagcagtcgcgggaatggctttccgggtgacatctgccagtttggtccccatggcgctcatcccgcgggctcggaccccagcctctcttacatcttccccttgtatgggaaggggtcgcagcagcccacagcttcggcccggcttccgggcttggggaatcttctccgtatcgtagctcttggctcctccatataagacataggaacatgcctggaggcaaagctcctttctaggagagatgcccctctcttacttacataatattgctgggaaattatatgtgaattgcatttttaaaagcggactcatttaaaatgtttcaaaagaggcttgctagtcaagggactgctggcatgaatcattatggaaaacaaattaataaccttctgtcttcagaataaatattttaggagaaagcttggtagcagagtagaaagaaggcagcctttggccacagagccagctaagggttcaaatctcacacccgctgcttgcctcggctgcccctaaatgtgggtactccatgtttcacgagaccaaaaatgcaggtgggagtcactggtgcttgggggtttctgccttctctgccagtgttggggagtggggggccctattctccatgtcagccttgccatgagtaaaaacaggaggaaaaaaagagctggggacagaacgtccttcttctgttgcctccagcggcttcagagcagactttcctggaactccggtttcctgagcgcttgtccttgactcagtttccccagcccaagccccgccacatccatcgtgctagctcctcttagtgccgttcctgtagctagtggtcacccaccgttctgtattgtcactgccctttcctcggtgaccatatgtctgagggtttccatagaaaatcttagaggtttggctgggcgcagtggctcacgcctataatttcaacactttggaaggctgaggcaagcaatcacttgaggtcaggagttcaagaccagcctgggcaacataacaagactcatctctgttataaaaggtaaaaagaaaaaagaaaacgttttgtggttaaaaacaaacaaagaaacaaaaaaacccagaaaatcttagaggggcaaggccatccttcagaggccacggacaataaatacacgagtgtattcagccagagaatgaggttcctaagaggcctggcttcctgggtgttcctcagaagtccccaactcctagtgacagtggaggaggagcgtgtcccccttcggtcaccctgtccgttccttatgctctgctgataaatgccgcttgtactgcactgagccctatccctccatcgtgccttgtgtcgaattccacattagttactcaaagacacctggccttaaacttggcgtttttatctccttctgatcccaataaatggaagaggcttggggaggcggcagcctggtaggtacctgccacttggggcatttcttctcaggacacatttttagactctgtcttcatggagaaaggggctagaacccaccaggaaggggaggcagatgatggaaggtcaccacctgcttggccctgaccccgccactgccagtgggtggagggtggtgcccacttcctcatctttggctgtagtaacgagggtctcactgcagcatgcggtcctggggaggtggggagaggggagctggctgcaggctcctgccccgccagccctatgcactttctcatccaaggaccaacctggaaatctgtggggcgcccacgcggaaagtccaagacgagacccacttcacttgtgccagcagccagagcttcctgctggtaactttttttttattttttgagacagagtcttgccctcaggttggaggaccacccaatcgctcaggttggagtgcagtgtcacaatctcggctcactgcaacctccgcctcctgggttcaagtgattctcctgcttcagcctcccaagtagctgggattacaggcacatgccaccaccacacccagctaatttttgtatttttagtagatttcactatgttggccaggctggtctcgaactcctgacctcaggtgatccgcccacctcggcctcccaaagtgctgggattacaggcatgagccaccgcgcccagccctcctgctggaaatgttgaaaccacataagaccagaacagtggtgggagtcgggggctgtggccggagtgtgctgggtgtgcaggaggcggagttccctgctgttccctgtgacagcaggtgtgtgtgtgtggggggggagctgtgacagtacgtgtgtgtgtagatagcacatgtgtggagcctcagctcagtgcctggcctgtgtcccaaggggacactgggtcaccgtttgtttggggtctcagtcttgaggagccaccactgccctgacactggttgctcctctggccacaccgcaggattgattactaaccgtggaggtgacgtcgggttgttgcatgtgtagaaacgaggcttgcttagagctttcgcccgttgggtaggacagcctggcttaccgggaggagggtatcctcttccctatggatgcagcccacgatccccatggcaacataccttccagggcacagcgtggcagagccagggctggtggtgttcctgctggtgtgacaccaagggtgttgatcttgatggaaacgcccacgtctctctttgttctgggaaagaaggaaaggtttcctggtgtctgatgaatgtctaatgtgttccacagggaggattaggcacccgcgagggttcagtggggagtaaagtttgtctgccatcggagatttcaccttctagactggcccttcccagatgtcactgggaaaagctctagtccaggagggaaaaggtgggctgtgacggggaggtggccagggaggggtgctgtgtggtggctgggactctgacaggcgggagaagccacaggaacatcaggaggtgagcgccaggatggctggagccttgaagggtttttctggggacaggatcctgctctgtcacccaggctggagcgcagcggcacgatcacagctcactacagcctccaactcctgggctcaagtgatccctccgtctcagtgtcccgagtagctgggattacaggaacgtggcaccacagtgcctggctagtatattttattttattttatttttatgtgtttttttttttttcttcaagtgtcttgctctgttgcccaggctggagtgcagtagcacgatcttggctcactgcaacttccaccttctgtgttcaagcagttcttctgcctcagcctcccgagtagctgggattacaggcatgcgccaccacacccagctaatttttttgtatttttagtagaggtgaggtttcaccatgttgcccaggctggtcttgaactcctgaccttgtgatccacccgcctcagcctcccaaaatgctgggattacaggtgtaagccaccgcgcctggccgtagtttttaaattttctgtagaaacagagccttttgctgttgcccaggctagtctcaaactcctgcgctcaagcagggtcctcccactttggcctcccaaagtgctaggattacaggcacgagccactgcgcccagttgaaggttttctgtttagaattagttttttaaagtttcagttttatatcattagattaatatatttgccatcatatgatattgtgtctttttaatccagaaattgtagttaatttgcagaagattgcagttactctgcagataaaattgtatacgttttctttgaatctacaaaaagagtccctttgaaagaaaaacatttttaaatgttctaactgaacatccattccctattgaattaagaatcaatcgtggaacataataggcggtggagtgtttctagggtatattgctttctatatttttgttttttttggaatatagtggcacaatcatagcttactgtggcctcgatgtcctgagctcaggcgatcctctccttatagcctccagagtagctgggactataggtgcgtgccaccacaccctgctaattttatgttttgaagagaccgggtctcactttgttgcccaggctggtgtcagactcctgggctcaagctaaatcacccaccttggcttcccaaagtgtcgggattacaggtgtgagccactgcgcccagctctgatttttgtatttcttacttaaggcgacatacttagtagctgtgcgtcttggggcagatacctcccaaagccccagttctgtcatctataaataatgtaacaacagggccccgctcgcagggttgctgtgtgcacatatgtgtgtgtacgtacccatgtgcctgtacgagaagggctgcgcacaggcctgtccctagagtttagcttatgttcgttattagcattaacctgggaatactcaccgtgtaactcatgagatacagtggatttctgttcctcagagctagcttggggaatttctatgttttattttattttatttatttatttatttatttatttacttatttatgaggcggagtttcactcttgatacccaggctggactgcagtggcgccatctctgctcactgcaacctccacctcccaggttcaagtgattgtcttgccttagccttctgagtagctggaattacacgtacccgtcaccatgcccggctaattttttgtatttttagtagagacggagttccaccatgttggccaggctggtcttgaactcctgacttcaggtgatccacccgcctcggcctcccgaagtgccaagtggcatgagtcaccacacccggccttagctcgggcaactttaaaaaaaaaataacaacaaatataggtagtttcagcttaaagtgtttcaaaagttggtttgtggccagacacagtggcttacgcctgtaatcccagtgctttgggaggctgaggtgggaggatcgcttcagaccaggagtttgagaccatcctgggcaacatagtgagattccatctctacaaaaaaatcaaaagattagccaggatggtggtgtacacttgtagtcccagctacttgggaggccgaggtgggaggatggcttgagcccaggaggttgaggctgcagtgagccatgatcataccactgcactccagcctgggcaacaaagtgagatcctgtctcaaaaaaaaaaaattggtttgtaataacaattaatcatcttacaaatatttattgaacaccttccatgtgccagacagtttggccctgggaataaaaccctatctccattctttaaaaagtttcttatctttcttagtaagcaaatagaacccaatggcagagcgtgttaagtgctaggatagaatgactggaatcttctgactgtagactttccccacagaaacactcttatgtcagtggtgataaagttctctggataagccacatatggctcagtaaccctttttatagataaacagttctgctttttgagccttggttcttaacctttaaaatatccatgaaagttgaggacctacgcacctgggaaatgcacgtttgcagtttctggggggctcccagacactcatccatgcagccttagtttagaacaccagttctctgggcccatagtcccagtttcagctcaccattccaggagaaccagtgggtcacctctactctccttctcctccttgtgtcctggggtggaaggggatgaaggagggaggaggggggattctagagctttggggtgggtgacagatgagtaccaaggcctgaccgctgggcagggacagggtgtgcctggccttgggctgggtgctggggagtgggagatgggtgaaggagcaaggccacctgatgtgacaaggggctccacgggctggcagcaggggcagcacctctgcactgggctggccacagcatgtcaggagggagcagcagcagctatctggaagcctggtggtgttagaatcatgtatgtgagcagtggaggctgaaagcctagctctcgcaaaccccagaaagtgtctcttagcttttccgtttgccgtttgcttttccatggctttgatcgcggtcaaactccgatttcccgcgtgtgtgattccagagttcttctggaggcgaggttacgggaggtctgcagcatgtctgacctgcagccccggctcactggcctggctgtagggagttagtggatggagagtggctggacagtttggagaccaggtaacccagcgtggggtcctccctggagaaacccccagtgctcctgcgacatcggcctggcttcagggctctgctatttgaatgtgatgctcaactctccaataaatggtcgtctgtgttaggcttgcttccagaaagagctcagggatggttttgggttttgttctgcttcttttcaatatgggaggaaccttctctgatgggagaaaagagaggaggagaaccacattcctgagatgctgtgattttatcatgaaaccatccccagccctcatcctggtgacgtcagtcggcccagtcctactccagaacgcttcttgggtgtctgtctgcaggactttgctcagttaatttttgtctcctctaaaacagaccccgttgctctgggaggagagccgagctgcggctcaggggccgtcactggtcatttttgccctgatgtatttttgcctctacatttcttgatctctggaacgttaatcccaacgatgcctggtctgcggtgctcacagtctgtgtctgtgctttctacacctgtcctgctcagatgcacatgatgtcacacccaggtctccatcctggctcttgttggctgcggcggcagccctgactgtcggagacgcctggctcagcatgcccaccttgcaacagggagcaccctgtgctgctcacagaactgcccatccactttcttttcctttcctgggtgccaacatcttcctctgccccttctacgccggcctggcgcatttctctgatttctgtgttcccgggtagcagttgtaaaaattcaggcttgggagttgtcttgagataggacttggaaaggaatcttttaccatcgttgaaattggctagatttgtggattccttcccgaccctggcaggcacggtgaggggaggaggtccctcctttttattgatcaggatgcactgtgtgcggggtaagccaggaagccacgcacctgatgctatctctgccatggggaggaggacagaggatgggaagatgctgtgaacttttatgattcgtttttcactctcggtgagaaaaggagctagcaggatgggtgagggagtggagggtagtaatatatagttgtggcctgggcccaaacgcatttagtcactgcctcgacagcctttatatagacaccaccagagtgactcagcctggaaaaagagagtcacttaaaaataaagttgcgactccagtggacacgtggtgcacaggctgccctgagatagtcaccagggctccatggccctgcacaccccccaggaccctgggcgagtcaggtggtgaagtgagggtgatcgttgtaaccccatcttggcattgacgtgaggatttagcaaagtcacatatcatcccaattacttttttccttttttttttttttctttttggagacagggtcttgctctgtggcccaggctggagagcagtggcatgatctcagctcactgcagcctcaacctcccagcctcaaatgatcctcccacctcagcctcccgagtagctgggactacaggcgtgcaccaccacacctggttatttttttttattttttattttttgtagagatgggggtctcactttgttgcccgggctgatctcgaactcctgggctcaagcgatcctcccacctcagcctcccaaaatgttgggattaccggcgtgagccaccacacctggcctttgatgctttctaaacatgaaacagcatccaggcatcatcggctactccttgatatgtcagtgttacccactggactctcaactcttctctgttatcaacaaatcttgttttactcctcattagaccctaaaaccactgcacacagaaaagtgaaaagcccagcctcattttcctttcatcacgttgagcccattgagttggcttcattgaaggcccacagccctgatgtgacacaatggggcctttttttgagctagaattccactccgtcacccgggttggagtacagtggctcgatctcggctcactgaaacctctgcctcccaggctccagcaattctcctgcctcagcctcccaaatagctgggactacaggcatgtgccactgtgcccagataatttttttgtatttttcatagagatggggtttcaccatgttggccaggttggtctcaaactcctggcctcaaatgatccacctgcctcggcctcctaaagtgttgggattacaggcatgaggcacagtgcctggccaaaagtagatttctatagagatagaaacccccaggggtgaggggatagaggaatgaggaatgactgatagttggtatgaggtttctttttggaatataaaaatgtcctagaataagacagtggtgatacttgcacaactttgaatatgccaaatgccactgaactgtgtactttaaatgggtgagttgtatggtatataaattatacatcaataaagctgttatttaaaaaaaaaattcagccaggtgcagtagctcacgcttataatcccagcactttgggaggctgaggcagatggattgcttttgctcaggagttggagaccagcctgggcaatatagtgagacctcacccctacagaaaaatagaaatattagctgggagtggtggtgcgtacctatggtcccagctactcagaaggctgaggtaggagggtcgcttgagtctagcaggagattgaggcttcagtgagccatgattgcaccactgcactccaatgtgggtgacagagttataacccccgtctcaaaacaaacaaacaaacaaacaaacaaaaaacctaaactaaattaaaaaagaattcctctcttcatgggggtgtcagaaacccccgaagagatttcttattcagttgttctctcatcctctaaagaaactccccacagaaaagtatcttgtgaattttcatttttgcagggggcagtttggttttaaaaagtctactccaggatttggcaaaatgagaaaaccccagtaatcaacttgtgtgtttaatcattctagaatcacctactgttaagttataataagcctttaactagaaaaagtttaaaaattaaaagtgaacttttaactgttaccaattaaaccctttaagccagtttatcaacccaagacattattttctttcttttgggtctctaggggagaagaggtgccttgagtgggaccagtaatgaaggcaatttgaacctaattcgggccccagtcagggaaggtggctgcattatccccctacatcccagcaagactttgccgcatggtctggagggcaccagcaggggcctgtagggaagaggaggttgcctgggcccagggacattgaatgctagtcaagccctggtttcatttgctccaacagcattaatagtattgtgacctccatggcactgtgacagaaacttaaccccagtttcttcgtctgcaaaaaacataccctgcctacttcaaggggtcctggaggctgaatgtccagtctcaggccaggagtagaacgcataactagtaagtggtgacgtgcagtgaccttgagcaaggtcaaaaactgttctaagacttggtccccttatgtataagcaggaagaattggtgctatcccatttcacccaggaggtgaaatgaattcagatgcacagagcatatagtaggtgctcaacaaacaccctcctctcttctttccttccttgctttcttttacaagtagtcctgagcccttttctagggccaggggcagtcagatacagcagggatggagggagaagattccagatctcacagagatctggcagtggccaagtaaacaaatgatgcacaagataatttcaggtggcggtaagagctcagacagaacaagatggcagtgagtgatcaaggatgggcgaaggtactttggggagtcagagaacgtgttttgatcttaagaatgcaaaatgactttttgtatcacctgtcaacacaacacacacacacacacacacacacacacacggaggctttagtgcaaattttgaaataaccattgattaattttggcaagctgttagcagtggagtcccccacatttcttccatgtaaagccctgatcatcttggctgtaaccactcacttactttgaagcgtcagattcagtctctctgctttctaagaccagggatgctatttaatctgggcattagaaaattcagttggccaagtgcggtagctcatttctgtaatcccagcactttggaggctgaggtgggaggactgcttgagaccaggagtttgagaccagctggggcaacatagcgagaccccatctctacaaaaaaatgaagaaattagccgggcgtggtggtgcatacctgtaattcaggaggctgaggtaggaggatcccttgagcccaggagttcaagactgcagtgagctatgattgcgtcactgcaccccagcctgggcggcagagcaagaccctatcttcaaaaaaaacaaaaacacacacacaaaattagtcaatgaattgtggagtttcaaagagaccttattttgtttgtttgttttctgggccaaaggcccagaaattcttaggtaattcttcggtaattaattcttaggcaattcttaggtaattaacgaggagctaatctcccagttgctctgttccttgtcactggaagtggtcagagctgttgcggggcttggcccaggggcggcgggtggcatctgaagaccccgcaggccctgctttccttccgggagcatctcaggacggccgctttgtctgtctgcccccgccccttgctgaaacgtcaacaaggccggcatcccctttccttcctgagagccatgtgtcgcttccttcatgtgtccagccgtttttacagggctattttaagtataaaagacgcattatctgagagtttaataactgtcaaaagggaagcactgtcattagattcatgtgccctggaattttagtcaaaaacatgctgcgttctatcacgtctaagcctctattttcttatctcaaaaaataggaatgataacgacctcggagtcattatgggctggatgaactcttatagggattcagaacaacccaggcaccaagtagaaggtcaataaatggcttattgtgttcatgttaccaaaatctactcttttgagaaattgtgttcacaaatggccttttttttttcttttttctttttttttttttgagatggagtctccctctgtcacccaggctggagtgcagtggcgcgatcttggctcactgcaacctctgcctcccaggttcaagtgattctcctgcctcaacctcccaagtagctgggactacaggcacctgccaccacgcctggctaatttttgtatttttagatggggtttcactatgttggccaggttggtctcaaattcctgaccttgtgatctgcccgcctcggcctcccaaagtgctgggattctaggtgtgagccaccacacccggcctcacaaatggactttttttttttttgagacggagtctcgctctgtcacccaggctggagtgcaggggcgcgatctcggctcactgcaagctccgcctcccgggttcatgccattctcctgcctcagcctcccaagtagctgggactacaggcgcccgccactacgcccggctaattttttgtatttttagtagagacggggtttcaccgttttagccgggatggtctcgatctcctgacctcgtgatccacccgcctcggcctcccaaagtgctgagattacaggcgtgagccactgcacccggccacaaatggactttaaagttataaatgtgacggagggcagtggctcacacctagaatcccagcactttgggaggctgaggctggcggatcacttgagctcaggagtttgaggcaggagaatcgcttgaacccaggagatgggggttgcagtaagccaagatcgtgccactgcactccagcctaggctacagagtgagactccgtctcaaaataaataaaaataaaataaagctataaacgaacacttaaaaaaattattaaagcctagggtagaccctagtttctactgcggacttgaacagatacagtaaaattaaaacttgccttcttccatatgtgtctagagagtaattttctctccttttgcattagtttcactgttcatagagtggaaatgtttgctgctggactttcttttttgaagctattctttgagagtagcccataacttgtctttctggtcaataacctcaactgaaatgcattctgaatggagaacgtcattctgtgtaggatttaataataacttcagcacagaaaagcactctctgcctcttctcagcaaacaactttgttgagcatgattttaaaggtgtaacggctaaatgtgaaagccatatgatttggttgaaatcgtggtgagctgttattaatatttattgagtacttgctaggagtcaggcattatgctaagtgcatgaccatcatttctctgcccctggaagtcaccctgggagctaagtatcatcggtgccacttaatgaagcgtaagccacccacccacctaccaggattttcccgggcagacagactcctgggaatgaggccatataatcccctgaacaccctgcctccttagggttccagaagccaattttttttctttttttgagacagatttttgttcttgtcacccaggctggagtacagtggcctgatctcggctcactgcaacttctacctcccgggttcaagcgattctcctacctcagcctcccaagtagctgggattacaggcaccaaccaccatgcccggctaatttttgtgtttttagtacagatggggtttcaccatgttggctaggctggtcttgatctcttcacctcaggtgactcacctgccttggcctcccaaagtgctgggattacaggcatgcgtcaccacgcctggcccagaagccaaatttttagtcacttaaccattagcaattcctcttctattagattttttttaaaattgcttttgagtatttctttgaagtggcatactcatttaaaggattctatatgtcagggggaatgttttctaggagggtacttaggaaggaacatatcgttatagcctaaaatttgccattggcctgtgaaagccttcttaacttacggaattgattataagccaaagcgtgggaaaatctccccttccactttgagattatgtcagtcaagaaaatgacaattggataccaagccatgctaactctgatacttgctgtcttcgttttcttctttctttggctagggggatggagcgcgtgtggtgtgggtgggactagtcactgagcatgttattgactaacattggcttttcattttaacttgcaaatgtgagtggcataaaagtgagtttacgaggagcatgactggcctgttatgcagagtcttgtaattttgtttgtggccctttattttaagaagatgttgtgttatatagttggtgtccttaaaggagtatataattggatctggaagcttagattgtgattctgacttggccacttaatgaatgcaagatctgagcaagccatgacctctctgttgttcagtctaagaaaggaggtgttggtgctgagcatggtggctcatgcctgtaatcccagcactttgggaggctgaggcggacgggtcacttgaggctgggagttcgagaccagcctggccaacatggcgaaaccccgtctctactaaaaatacaaaaattagccgggtgtggtggagtgcacctgtaatctcagctattcaggaggctgagacggagaatcacttgaacctgggaggcggagattgcagtgagccgagatcacgccactgcactccagcctggatttcagagcgagactccgaggttctgtgtggctgagagccacacattttgcaacaagagactcgtcccttttccataggtgtccttattcctattgatcttacctgtgggcccaagacttaggcacatccctttcttcttaaaaggcatcacctcctctgcctcttggagttttcctacccagaattcattcatgtgtgcagcaaatattcctggcagtcccattgtgtgtggaatggggtaaaccaggaagactgttgtgagggctcagtaacttcagggacacagccgtcgtagcttataatggcagctgatatttagtgagcacttactgcatatccagtactattctaaacactggaaaggcatttaactaacttaacactcacaggatccctacgaaacaggtacagtgtttatttctgtttcaaagagagggaaactgaggcccagagaggaggagtaacttgcctaggcccacaggtggcaaagctgcctgaaggttttttttgagacagagtctcactctgtcgcccaggctggagtgcaatggcacaatctcagctcactgcaacctctgccttccgggctcaagcgatcctcacttcagcctcccaagtagctggggctacaggcatgcaccatggtgtctgactgatttttgtatttgttgtagggaggggttctcactatgttacgcacgctggtctcaaactcctgggctcagtccctcccaaagtgctgggattataggtgtgagctaccgtacccctcaggaattcttattttttagatggaaattttaaattggcttttattggaatctcattaaatttgtagatttggagaggctttagaaggcattttcaagttttgattgattgttttagatttcattcataggtgaatttcattctctatattttacttgagggatccacggaaactacctacatggacttcacttactctggttcattgtgtgggatacaaaatcgtcaaaattgaaggattgatcattgtgtctggagccaggcataaaaataaacctcactctgttatcataggtggctgtgattaagatcgagggaaatgtcggccctgggcctcctaacattgacagtttccttcagaagattaagtgcggcttcatttttggcccgggccatcagtagcttaaagccattactgtctattggctgtttggtttgtctgaaatatggggccggcgtcagcctatttccctggggtcaggtgtgttcacataatcaaagtgccaggaacccatatcgcatgcaagcgtgtgtgttcaaattagccttctccagggaggaattcacagcaccaggaatacgcgcagagatgttcttttgcacttttgcattttaaaacgtgcatcgcttacgagcgcagcattttcaagccttttcttgagatcagctcgttcagttacatgtgcttttgaagatgaccatttgtgaaaccatcagccactggcaaagtgaagaaaaatgaagatttcggcctggttgatgtgtgctcggggaaaggtgatagcttctgtttccttgaattaaaagctgcagacaagtatattttcatttattttgtttataaatcaacaacccacgaaaggtatttcatacgtatttaaatgattgctttgccgccatcaagaaaaaatactgtttcacttaacagtgaattgagacaaggaaaagtgatgtgtgaatagaaataaagaaattaaagtaaaaaacaggatcagggtaggttctagggctaataatttaagaacagaacatgtggtttaactctttttgccactctaaggagaggtgatatttgtatttttctttttactgaaaccagatcgtgagacacgcttttcattcatacttgaaacttgataaaatgtttggctttatattaattttctcaattataagtgtgggaaatgaattcgttgataacccttttcaagtaaatgaactgattagaaccagaagagccgagagtcatttttattttaaaattctttttgcatgaacacatgtagtgttgaggaatatgtggaaaattgaaatattgcttctctcctaccgtgtctccagtgcctcgataaatcaccttttttttttccttttaaaatgtctggccttataatttatgtttgcataacccattactaaattcatagtaggtgttttagttggcaggcattattccagggatttggaggagtttaaaaaaaatacagagcctttgttagtatttatactaagtggacattttccttttttaacaacaacaacaaaaaagaattagatttttaaaaaagaattcagagctagctatttacctttttcctagacaaacactattaagtccatattctcacattattcattgtcttaatggagattaagatttcttaatggactttattatagcttttctttctttttttcaaaattagaactggccgaagaaaatgcttctactattaagatcagatgaatttctacagaattttcagtaggtgtcatgttgtataggaaataaacatttctgttttagtaggttttcgatttcttacctcccgttgaccgttttgatcataaagtgaagatgaatacattcattcatttactgcagtctttggtacttgaacagaaatagcagtgttcttggtttgttcgcatacttgtggcttacctttgagactttctaatttttaaccagacatttaaaaatagccattctgtcttttagccctaatttagaaaaacttgtagcgctttcctttgaaatgatgaaaaaaaaagttctttctgttttctatcatcaaagtttaaaaagcgatgtttggatattttaaaagccggaaagaccatgtatggcgtgctgaggaagtttgctttgtttgatcattttctcttcccctcacccccatcagctggctaataatgttttccatgttaaatgtgtatcacagcctgttgaaatccctgtggttaatcagaagagaagttgtttctatcctatggaaccttaatacagttgtcaggaggtttgtgaacagaaattcagaattcatcacactgtaacgatgatctaaaggtcaagttgtacagtataaatttgaaaatctctctctgacttcctttctacctaaattagagcctaaaagtcatgagaattttgtcttctttttgtttattttagagatagcatagtcgatgttttaaaaagttgccaccttttcactataatgcgctcccattatcagagatgtttattctggttgtatctctctgacaaccttcaatacttaacagaataatttagtttggattcaaagaagtgcctcttctatttctgtgtttgtttctagaaactttgaggtggaggaattattgttccttcttcttggcaatgttcagggtttcacgaatctgacttttaaaagcccagctctcagccccgagcctctcatgagttaaagaaagggttttgcagcttttggtagacgagaaacacattttatggctcttcatgaagttgcccgctccgtccacgtcctgtcctcttcctccttcccagtttctgggctccctggctcttgtcatgaggctttcagttttgtgtcccagaaagcgcttcccccggggacagtgccatgccaaggctgggagaagggaaaaaggaggtgtttatcgccttgaagatgccttccagcctttattattaactcccttccaaagtaaactttcgggtttttttcaagtctgttctggccaaagtacagttgggtttgccgtgttctctaggagtagaggtgaaaacagcattgcccggggtgaggagcaggaggaggaagggtccacgtataggagtggatggaggggatctgtgagacagctgctgggacagatccgacttggagactgtcaggcctctgagcccaagctaagccatcatatcccctgtgacctgcacgtacacatccagatggccggttcctgcctttactgatgacattccaccacaaaagaagtgaaaatggcctgttcctgccttaactgatgacattatcttgtgaaattccttctcctggctcatcctggctcaaaagctcccctactgagcaccttgtgacccccactctgcccgccagagaacaaaccccttttgactgtaattttcctttacctacccaaatcctataaaacggccccacccctttctcccttcgctgactctcttttcagactcagcccacctgcacccaggtgaaataaacagctttattgctcacacaaagcctgtttggtggtcttttcacacggacgtgagtgaaagagactgccattcatgaatggacaaggcctggctccgtccacgctttcccagctctgtgtcctgccatcggacatgctggcacatctgctgtgggtgccctgcacttctccgggcactcctggcccagctggggaggttggcatggtatccaccattttgttctaaagtagtaaatgaaactcttgggagggcagcacccagcagatgtttggagctagagacagggctctggggatgtgtaggaacccggacctggtgtggcaatggtgtggggctgtcacgaggcgtgaggaggctggggtggtgttggggacagcacacgatgctggggctcaggccaagtgaagcttggacttcactctgtctgaggctttgccaagtgtcagagggtgcacacttgggagtcacatggccaggctcacatttccagccgaagttacactctacagcctggcagcagatggacgtttggggacagaggtggagccggaacagctgagacactgttttagaggactctgcgagaaacacgctcttaaaacaaggaagcggtggttatgtcttattcaacaacgatctgttgtggaccagctgtgtgccaggcagttgcaggccctgaggctgcagcagtgagcagaaggccaaggtccctgccctcgcggtgcttacattctagtggagacagatgttaaactacagggcaggaaaacactgtcaaggagatgcaggtggaggattctgactgtggaactggggcatagagacagtgggttttgaaagcacttggctgagaaggatgggaggagggaggagggaggagggcgggtacatctgtagatggaccaggttaaggtatggacttccccatcctgacaagggggagccccaagcttgttttcaggtgtgacgggggtggggagaaagagagcattccaagagaggcacgaacgtcatttccagagcgagatgaaggtcacagagtttgggaggagatgggatccggcactcgggctggcgagcagacaggagggaactcagggagatgggaaccccggggaggaagttagggcaggatcccctgggagttttcccggatacataggagaaaaggttatccttcaagggtgagcgggggctaagtgcaggggacagaagagaggaaagcccggcgaccatcatgcccggctgccgtgggtggtctggattggaggcggcagccgggctgtgtttgtgcggagggtggcagggggccagcggaggaaactgcccaggcgccagccctgccatccccaccggcctcctcgctttggggttttgctttctgccctggccacgtgggaccggctaggtggagatcatgcaatcagggttcccagctctcagaaccataatggttaagcaagcagcttcgtttccaggcacgcaggagctcccccgtgtcagcgttttcctaacatggctaatcataaaaacctcctgggtgtgtgtgtatgcttgttaaaaatactgtccctgggccccaccctagacttagtgagacacagtcaccggggaagggcctggggacttgcatttagaaccagctcctggaatgcttactctgaggccagtttgggccccctcccatggcctccctctgtgtcccttcctccagatgctgattgaggatgtgtcccctgccgggactgtgtttgcatgtctctgtctctgtcacaaagtagatgcctggggagtgtgtgctgcgtggccccctgaagaccctgtaccgggatgtcagcaccccagcccccagctcctccccctgtgaaagacattagctcctggaggggctcaggtggtggaaatgaatcttagcatcaatgtttagacctaaaagccatctccaggtcatcatagcacatgacagagatagaggcagaacctggtggccataggattatttctgagcaaagatcgcccaagctttggcataggccagggttattcacatgtccgagtccctggaagtggggtgtgaggaggttgtggggggccttcagaatgagggaaaagggataaatcaaaatcaagtctttttttttttttttaattgagacagagtctcgctctgtctcccaggctgcagtgcagtagcacgatcttggcccattgcaacccctgcctcccaggttcaagcaattctcctgccttagcctcccgagtagctgggactacaggtacgtgccaccatgcccagctaatttttttgtatttttagtagagacggggtttcatcatgttggccagggtggtctcgaactcctgagctcaagtgatccacccgccttggcctcccaaagtgctgggattacaggcgagagccaccgcgcccagcctaatgatataaatattagtagatttctgcttactcacttcaccaccagcattttctagcaaatgtgagttcagcagacaccaaagatttttataaatcaaagtagacagtctttaacgttgagaagattctgttaactcatctgttctacccacactcttgcccttccctcctcacagaaaagccaggagaagggtgaataattgaattacagatgacagtaaatatttggatctagctgcttatgaggccttaatgatatcagtcagtacaaaaggttgatatccatgttttttggtgtgtgtatttttttttttttttgagacagtctcactctgtcactcaggctggaatgcagtgacgtgatcacagctcactgcagcctcaacctcccaggttcaagcgatccttccatctcagtctgctgggtagctgggaccacaggcgtgtgccaccacacccagctaattttttgcagagacagggtctcgctatgttgcccaggttggtctctcaaactctggggctcaaatgatcttcctgtgtcagcctcccaaagtgctgtagttacaggcatgagccactgtgcctggccgatatccaccatgtttggagcctgtttttggttacatttcatcctcatctactggcctggagatattggtgtcaatcagttcttcactgggggaagagatttttttaaaaagtcagatttacactcagtaagattcacccttttcaggtgtccactttgatgaattttgacaaccacatatagtcatgtgccaccaccactattaagatagaggacaggctgggtgcagtggctcacacctgtaatcccagcactttgggaggccgaggttggcagatcacccgaggtcaggaattcgagaccagcctggccaacatggcaaaaccctgtctctactcaaaacacaaaaattagccgagcgtgatggctcatgccggtaatcccagcactttgggaggctgaggcgggcagatcacttgaggtcaggagtttgagaccaacctggccaacatggtgatacttcgcctctactaaaaacacaaaaattagctgggcatggtggtgtatgtctgtaatcccagctacttgggaggctgaggcaggagaatcgcttgaacctgggagatggaggttgcagtgagccaagatcgtgccactgcagtccagcctgggcaacaagaccaaaactctgtctcaaaaaaaaaaaaaatacatatatatatatatatatatatatatatatatatatatatatatatatatatatatgatggttccactgtcccccctattctcccaggcctctatgtagtcagtcccttcccccaccctcagcccatggtaaccacttatctgttttttgctggcatcattttgtattttctggagtgttacatagagggatcataccatatgcagtcttcgagtctggcttctttcacttagcgcagtggatttgcagttcaacagtgtggccgctgtcagtgccaagtagtattccattgtatggatgtaccacagcatggagggatttttaaggctggtcaggcagtgcttatgtcacaggtccaacatccagtcccctgggccatttaaagccaagcacagccccacacctaaccctcgtctgaacgatcttgtacagccactctgcagtttcacatcctgaatgtgagcagtctttttttaaagaaggaggttttgggccaggtgcagtggttcatgcctgtaatcccagtactttgggaggctgaggcgggtggatcgcttgagcccaggagtttgagactggcctgggcaacatagtgaaaccccacctctataaaaaaaatacgaaaattattggtggtggttgcctgtggtcccagctgcttgggaggctgaggcaggaggatcacttgagcctgggagtttgagaccagctggggcaacatagtgagacccctgtctataaaaaatacaaaaattggggctgagcgcggtagctcacactttgggaggccaaggtgggtggatcaggaggtcaggagttcaagaccagcctgaccgacatggtgaaaccccatctctactaaaaagacaaaaattagccaggcatggtagcgggaacctgtaatcccagctacttgagagcctgaggcagagaattgcttgaacccgggaggtggaggttgcagtgagccgagattgcaccgctgcactccagcctgggcaatagagcgagactccatctaaaaaaaaaaaaaaagccgggcatggtggtgtaagcctgtggtcccagctacttaggaggctgaggcaggaggattgcttgagcccgggaggttgagaatgaagtgagctctgattgcaccactgcactccagcctgggtgacggagggagaccctgtctcaggaaaaaaaaaaaaaagaggaggttttaatgttcgcaaagctggtcagtttccaatctggtgtcaccagtggaaaaaagatgtaagtgttgttggcaagagaagctcacccagagacacgctccatgaagtccctgacccccgctgggggtgcctgtgatggagggtaggctgtggtgcctgcgggcgcgcacaggtgagatggaaggaataaggggttattccttctgggtgcagctctgcctggaggccagagctgtcctcctcccttcgatctctgaattaaagacgctcttctagtattttcttatgttgatatatatgtgtatatatatatatgtgtgtgtgtgttttcttattgttctagttcttatattgtcatttaattcctttgtcctttagcttgcaagggaatgtgttttcttattagattgtaagctctggggaggtaagaccagcacttccaccctcccagatccttggttgggcacgttattgatcagtccacatctgttgcttggctgattgattaaatgctgtggtgcccgtgttcactgagggattccagacccctgtctagcccaaggatgcctcacagtgggaatgctggcacagctgtcttggcaatcagtagaccatcctgtcagttcttcaagcccagagagggtccgtgacttgctcagagtcacacagcaatccattagcgaggccagccccttccctgggctctgcatttctcttgtagtgaagagctcctcacagtttatttgcatactgtaaatttgcaaagtcagaaggaaaagggcagggagccgggcttccttgaggcaggtggctcttttaaagctggggcatgttgtcgccaatctgagcttgtttccatggacgcagccagccgggcagcctgttcccgtcaacctgagccctgatggagcctcggacctgacaggctgcctggggaactcactgggaggagggcgggttgggggagacccagaagccatgctggagtctctctctggcctactttttgccatagtttgaagggaaagttagtgaattgccaggatcaacctgcagtttccccaaaacttgcacaggagtggctttcatcgctgcatggggagacctcctttgcgggtctgcttagcggtagctggattgtctctgagggatacctggctttcctaactgttcctggagaatcttaaagacgaaaatggaagaaagggctcacatctttgttttgtgctgcaagcaaagtcttggaaaaatgaatgatgccaatggaatctatttcttgtaattaatttcctcaagctactggatctccttttcttgctgagattgtggtttggcagctgcagtttgatagccccattctgagactggatccctctcttccctcatctggtagttttcacgtcggggcattcctgaactccgtctgcctcgtttcaggctgggatcacagatcaggagcgaaggctttatgatattaactagtcaacagatacattctttgaagaatttctgtgtttttaattaccccacgaaagcctttggacgcacgggttatgaggggcattttgcattgctaaattccagccttgattgcaaacctgaaaagagcagaaactgctcagaacaagttgttaaaaccacagacacaagggaaaggtttctctctctccctccccctctctctgtccctgtttttaagtcctttcagctggaggtgaaactgcaacgttatcaaacatgccagtacacactgtttcccaggcctgtttttgcatgagttggggtagaaatgtacccagcttctgttccagtaggtggagaaagatgcttaaatcctagaagcactgttcacctacctttttagggtactgcaggtttagctcgagggttggagggcatccagaaaagcatgactaagagagaaaaagactactcccaaagctaacagggtggagtatcatagccaggacaggaaaattcccagcagggaaacggcctgtctgtaatgcagacacattgggtcataggtttgctttcacagaataagtgaaatggaacaaaagtcttttttgaattctcattccaagaggcccagtttctgcaggtgtgtcttttcgatcttaccttgtattcagtattatttcaagcaatctccattttaggcagtgtctactccagaccaaaaaacctggctaagaaagaaattttgttgattttgagacagggtctttctctgtcgcccaggctggagtgcagtggtgtggtctcagctcactgcagcttcaacctcctgggcttcagcgatcctcccacctcagcctccctagcagctgagaccacagatgcctgccaccacacccggtgaatctttaaattatttgtagagacagggtttccctgtgttgccccaggctggtctcaaaccactcctgggctcaagtgatccccctgcgtcgacctcccaaagtactgggatcacaggcgtgagccaccgcaggcctcccagactctgggtcagagggcagcttgagctcctccaccgactgctccaagcctttgccccagctcttggtgcctggggtggtgggagcagcatgggcttcgctgcacacggacctgggcccagatcttggttccatcggctgctgggagatcagttcccttctctgcacctccattcagcttggacgggaatctgtccttcctagaacagctgtgattaataactgagaccacacccatgttcgttgtggcttagcgccatgcacacaggtacctagtggatgttaactttcctctccatcctggtcagtgctttttttttttttttttttttttttactttttctttttctgtttttgagatggagtctcgctctgtcacccaggctggagtgctgtggtgcaatcttggctcactgcaacctccacctccctggtgcaagagattctcctgcttcagcctcctgagtagctgggattacaggtgcccgccaccatgcctggctaatttttgtatttttagtagagacgggttttcaccatgttggccaggttggtcttgaactcctgagctcaagtgatccacccgccgtggcctcccaaagttctgggattacaggtgtgagccactgcacccggcctctggtcagtgcttctgttgagttcaagaaaaatgaccaattcatctaaaaccccgagctggcagatgctctcccgcgcggcggcggctgacgtcagtgctactttcagcgtctttggtgcagtcttggtgttcgctctcaaatgggctcttttcagtatcacatatcatatgcaggatgcagaggggcccggcttacataccgagagtcagaggactcatgcggccacaagtaggttgggaacagtgtcccctaataggatgagttttgggctttaaaatttaaaaaaaaaaaaatgggggcattgatgagtctcgttggcaccttttggcttgtggaggctcgtgatctaatattggtctctgctgtatacccagcacactacctgccacttagccattccataaatatcgttaaataagtgaattaggccgagtgccatggctgacacttgtaatcccagcacttacagaggccgaggtgggaggatcgccttgagcccaggagtttgagaccagcctgggcaacatagcgagaccgcgtctctatttaaaaattaaaaaaaaaaaaaaaaaaagacaacttgagccgcacacaggttcttgccaaagcctctattagtgctgtgactcgggaaagaaaacttgtttttttcttcagttgactgggctcagccatcccaggtgtgagtgactcaggccttgagagcaggtaatggatccatagggagccctgtccccacccagggagactgtcccagcccctcccgatggctccttccagaaaggggcgcagtgggctgggttgcagggggtagttgtgtccaagagtcctgcaggatggagtgggaaggggcaggaggggtgtcctgcactgccagctgttcatctaccccagtgccatggaaacagagctcctgcttttccccaggaaggcgttgatacatttataggctagcattcaacatcagcgttgtgctctggcagtctcagcagtaagacataaacctaccaaggtctgggggaagcactgggtgttaccatcctggctcacgcgggagacgcatgctcctccgtgactgtttgtggccagtgagccaccagttgacaccagcaatccagccttctgcccctctcacttcacagatgagggaagtggggatctgcctaaggtcacactttggtgcatttctcaaatcaaacccaggagccggaatttttctactgagctcctgctaagacaccctgggtcgtttcctccgggcagtccatgtcatctgctgtggcgtgtatgttcatgggtgattctgtttctgtttttaaaccctgtgcctcttggttggtgcttttcctcctggaggatgctgcagacctgcagcggtcacctcgggccacccagggagcaggtgggcacacccaggttgcatctgtcgccacactggtgcaggccgtgttgcacatcactgctgccgggttgaccccacttggtatgaaatgagagggcctcttttctgaagcaaggtgttgcaatttagcctggggatgaagctgcttcttccaatacccagagttaacaccaaatgccacgagagtgagaaaataagacagcattgcactttcccagaaattgtcaccccagggtgccaccccacctcccaagcccactctgggactccttccacacacagtcacccactggttaccaagcctgcggggcaggtgctaggtgcgtgctgggagtcaggggtggatgaggtcttttgcagacagggcagagcgacctcagggcagagccatgagggcctgtgtgcagcggcttccacccaggcaggctccggctctgcaccttcagctacaggatacacttgctttcgacacctccactgtcatttagacacaaagcacaccaccaccgaaaccactccacagaatgtagagtttcttgccaggaaaataaaataaattaaaagtcactaatacttttatttaaattgcgagtacatttcctcgctgttgcattttgtaatttatacctgggagttaatttattgttatttacagttgcacaaggactcatggaaatgccttgtgtatcgagtgttctcattatgctgggcacggtcccaggtgccggggaggcaggtcatagtcctggcctcgtggagctgatgttctgaacgagagttgagtacccagtgggacatcctgagagcccaatgcaggtcctggtcagggctgtggggactgtggggaagacctggatggcaagaggagtagggacaagatctacaggattctgcatgcagggctgcaggccaagagggaggagttgggggttctagtccgctaggttcagggagccagacgtgtctgctgtcccaaacctcctgtgctcaggaacgtggttctgatgagcctgtatcaccttcccttccctccacctatgggtctgagtggcaggaagagttctagctgtgtcagccaaggccggggacaccagaggcacagggcttggtttaggagtcaagacaaggcatttgcttatttaaagaatgagttctatgcacttccaatgagtggttctgtggtcaggagggcggcacctggagagaggtcaaggtagaattgtggatttggaagggtggaggatggaaggccccagaggaaaccagcagtcagggactgaggaggtgatggcattctctagtgtgatgtgtggacagacagagtagaagaaccaaaaccagtcttggagcgacaggtgggtcagacggcagctttctctggacccgggtcaggaagagaagggtttccagcaggagggaagattgcgcttaggaagagaagggtttgctgggctcgatggctcacgcctgtaatcccagcactttggcaggccaaggcatgtggatcacctgaggtcaggagttcattttgagaccaacctggccaacgtggtgaaaccctgtctctactaaaaatacaaaaattagcccagcgtggtggtgtgcgtctgtaattccagctacttgggaggctgaggcaggagaatcacttgaacctgggaggtggaggttgcagtgagccaggatcgtgccactgcactcaagtctgtgtgacaagagcgagactccgtctcaaaaaaaaaaaaaaaaaaaaagagagaagggtttccagcaggagggtcagtggcggtgaagcttgcagctggcaaatgttgggttggatttggggtggggagtgaggccaggagctggtggaggggggcagaggaaggaaagatcactcactgctaagcctttcagatgagttccccgtggtcatcagaggtaggccttgctgtcttaattttacaaaagatgaaagccacaggaggcatagacttgctcagagaattcatactcagttcagcagactccagtattgatgctcaacccatgctgctgctggggagggctcaggggacaatgttaagtgagaccaaggaggtggcacccctgaaccagtctctccgtgagctcggcggtgagaaaacagtgcacagggagaggagccacagaaggcccgggatgtgtcacccagggtttcagctgggaggggacaaagccgatttgggtgggagagtggaagtaggtcccaagaacttttattttaaatgttttgatgacagatttaaaacttgagtaacttcattgtaaaatggccaggcgtggtggctcacacttgcaatcccagcactttaggaggctgaggcgggaggatcccttgagcccaggagttgggagaccggccttggcaacatagtgagtgagaccctgtcttgacaaaaaattaaagaattagccaagtgtggtgacatgtgcctgtagtctcagccacttgggaggctgaggcaggaggattgcttgcacccaggagctcgaggctgcagtgagccgtgatcatgccactgcactccagcctgagcaagagcgagactccgtctcaaaaaaacaaaaaccgaaaaaaccacctcactattctaggcccgagcccgagcttaaatatttaccccatatccaaccataagttaatcccgcacacaccttcatcagtttcttaaagaaactggtgccccagcacggggcatgccaacgtattagacaggcaacaacttagacatggggatgaaatgaattccatcttaaatctcaaagtgcacaatacagtctctaaaattaaagaaaagaaagatttatttccaaaaaagcccacagtgaaataattgtctcagtctgtggagagagctaatttggacagaatcacatattttgattcctgggatttttttaaaaggaatcttttaaagcagtaaatgaaatatttttggatgtagacaaaaatgacttacttagccattccactggcaatgtggaaaggatgaagaccaattttgagttagcaaggacaccttcagaaagttcagctcccaggaattgttgaccctagccatccatgtctgtatttcctgaggactattgcttacggaattaattgggactaatttctgttgcacctgatctccagccaaaacactcacattttgcctcatctgcagagacctgggctgagttttatctctgcgtcactgccgagttccctgcccccgctctgttaacagagctataattaactcacaggacgccaggcagccagattcggccaggcgccaagaaatcagccccaattactatattcacattgtcagtaatgcccacttcacagcttctgctaatttgaaatggcaagttccaactttccatagtaaaattaccatttttgtcctattctattacgtggtgatatttgtccattatttgggctccgtaaacttggcattatcacgacaattagttgttgagggttttctaaaatgatttgcaattacatctcttaagcggaaaactgtctgctctgatggagtgagaatccattccctctgtgccctagatccactttaggaattggcttttcataggggaacgtggtgcctcgggattttataataaagtcgagcctttaaaataagggctagccttggaacgttgcctgctttgtagatttccagtgttcaagttgtctgatttctttataaagatggagaagtgtctctgtccctctgggtctccgagttcccttgagtctgggcctctgtatctggatcccctcaagccctactttgttgtaagagccaaattagccaggggctactggttggtggctctgctgggggggcatcacagagtctctcttctctgacatttgctgaccttcaacccgccctggtacaggagcaccccattgaggtcctccgttttccagagtcctgtccctgaggaatcacctgcctgagtccctgagcttgggactggctggcctgattgggttgtacattttgttctcttttcagcagagaaatctcaggaggcaccatgccaggccactgtgcccctgcaagtgtgtctgagtatggcccaggaccctgcccatcactggtctgcaacaagataagcacagaagttcagagtaggtgtctagaaatgttcatagcaatttaacgtgacggtgacatccaagtggcattttaattttattttataaagatctgagtccacaatgggctggaaatgtaaaaatctgttgtgtgttcttctcccacagattgtttgacaaacattggtcattattattattattattattttgagacagagtctcactctgtcgcccaggctggagtgcagtagtgcgatctcagctcactgcaagctccacctcctgggttcacgccattctcctgcctcagcctcccgagtagctgggactacaggcgcccgccaccacgcctggctaattttttgtattttcagtagagacgggtttcaccgtgttagccaggatagtctcgatctcctgacctcgtgatccgcccgcctaggcctcccaaaatgccgggattacaggtataagccaccgcacccagccaaacattggtcattatttaatctcctcatctctgattggatttcactgtgatcatttactgtggctaaggcagagtgcttgctttttttttttttctttttcttcctttttttttctttgagacagagtctcactctgtcgcccaggctggaatgtagtggcacgatattggctcactgcaacctccacctcccgggttcaagtgattctcgtgcctcagcctctcaagtagctgggattataggtacacatcaccatgcccagctaatttttgtatttttagtagagatggagttttgccatgttgcccaggccagtctttgaactcctgacctcaggtaatccacccacctcagcctcccaaagtgctgggattacaggcatgagccaccacgcctagcgagtgcttgctttttctgctagacagtggtcctcaggcccaatccctgagagaggggcttctgagaggtgaaggaggcaggagttcttgcccctgactctcaggagctggtgtctcctgggcatcactcacggatgggctgattattgctcattaccccacaggatccgacagttccagtacaagctgcttctttgagacagagtctcaccctgtcgatcaggctggagtgcaatgctggcgcgatctcagctcactgtaacctccgcctcctgggtttaagcgttctcgtgcctcagcctcccgagtagctgggattacaggcacccgccaccacacccggctaatttttgtatttttagtagagacgaggtttcaccttgttggtcaggctggtcctgaactcctgatctcaggtgatccgcctgcctcagcctcccaaagtgttgggattacaggcgtgagccactgcgctcggcccagaagacttatattttatgatataagaaaattatatgaaattcccaaaaaaacccagaaaattatatgaaattcaaatttcattgcccatagtttgttgtttttttaaaaaaaaaattgtagtaaaatacacataacataaaatttaccattttagttattttgaaatctacagtttagtggaattaggtacattcagtgttgtgcaagccatcactgccatccatctccagaactttttcatcattccataactcacctccataaataaagttttattggcactcagccatactcatttgtttatctattgtctgtggctgcttttctgggctacagcagcagagttgagtagttgcaacagagaccatatggcctgcaaaacttaaaatatatttttttcttctttcttttctttttttatagagatgaggtctcactacgttggccaggctggtctcaaaaatcccagacctaagcagtcttcctgccttgcctcccaaagtgctgggattacaggcgtgagccatgtagaatatttactatctgaccctttccagtaaaacttggccaacccctgtcctggtgcacactctccttacttcttagttaccatagcaactgcctaactggtctcacttcctttggtttcattccctttctgtatatctgccccctggaggagtttttccaagatacaattctgattgattaacttcgctggttaaaatcttttagcaggctggtgcggtggctcaacttgtgatctcagaactttgggaggccaatgtgggcagatcacttgaggcctgaagttctagaccagcctgggcaacatagcaaaacaccatctctactaaaaatacaaaaaataagccgggtgtggtggcgcacgcctgtggtcccaaccacttgggaggctgaggtgggaggatttcttgagcctgggtggcagaggttgcagtgagccaagatcatgccaccgcactccagcctgggtgatagggtgagacactgtctcaaaaaaaaaaaaaattcctttagcagcatcctgtagactaatgccatgtctgggaacaccagtcccaggataactgcactagttattaaaggctctataaactcttgcagaaaagaaacctgctgaacatcgatcaacccagtacccttcaaaactcattgactgggcaagtctttttccttttttttttttctggagacagtctcgctctgttgcccaggctggagcgcagtggcatgatctcggctcactgcaagctccgcctccagggttcatgccattctcctgcctcagcctcctgagtagctgggactacaggcgtccgccaccacaccctggctaatttttttttatttttagtagagacagggtttcaccgtgttagccaggatggtctcaatctcctgaccttgtgatccgcccgcatcggcctcccgaagtgctgggattacaggtatgggccactgcatttttcttatcacccattctcattagcctacagcagggattggcaaactgtttactgtaaagaaccagatggtaaaatactgtaggtttcggcagggccatatggtctgttacaaagactcaactctgctgtaaagtagccatagataatacaaaaatggtgggcgtggctgtatgccgataaaactttatctaaaaagacaatcaggcccatttgaactcctgtcctgtagagcagtggctgtcaaggtgtggcccaggccagcagcatcacaggacctggggacttgttagaattgcagattctgaccaggcgtagtggctcacacctataatcccaatactttgagaggccaaggtggaaggattgtttgaggagttcaagaccagcctgggcaacatagcgagaccccgtctctacaaaaaaaaatacaaaaattagctaggcgtggtagcatatgcctgtattcccagctactcagtagacttgaggattgcttgagacctggaaggttggagctgcagtgagccgtgattgcgccactgcactccagcctgggtgacagagcgagaccctgtttcagtaataaataaattaaaagtacagattctcgggtctactccagacctgctgaatcagaaaatacgcgggcaggcccagccgcctgtgccttcaccagctctcctggttaaggcctgagaaccctgctacggaaccccgagtacctttcagaacatgttgacctcattcgcagggatcagtggccctttgtcatctggtctctggccagtgtccctccctcatctggtggacttggtactgatgccgaaccacctgtgggttccaaacgtgccattgtttctcccacccacgcatttgcacaaatgtggtcctgtgtggctcactcccttttctgccgccaccttctcccccactgcgccatgctggtctcagctcggggcttacctggtcccagaggtgtgttgggaggtccccaccccttgcctctgcccgttgccttttccacccctgcactgggtgtgcataggtgcgcagggcacgtgtgtgtcctctgcggtcactgacttgattgtctgcctttcccaggaggacatgggctctgtcgggacattttatccgtctgtttacaacatgaaatagacacctccgaaatgtgtgtgtgttccgtaaatgaaggagcagagggaccccttcggagcatctcagaggccaggaagcctggcttctggccgccctgcccgctcctcacgtgtgaggggaactggggaagtcgagtcagcccgctggggttcctgattctctgcggttctgggaagagcttgcagtggaaggcctcccagccatttcctcttctcccccaactgtgactcactgattgattaatgtttggaaattgtgactcatcttgttagagaaggaaaaggaaattttattctcttcattctccctccctttcaaataagtaataaataaaaagtggctgatcttccacttggtgcggtaagaagcatttaaatacattcccggccctcataattggtggcttcttggagaaaggtacttattagaagaaaaacacttccctatgtgttgttgttcggccttctcgttgatgaaattacacggtgagttggtgagcgaatttaccttgcccctttttaaaggtatttgtggcagctcttgttgtaggaatcaggggagaggagccacttctcttttagtaagaaatgcgaagagtggcctctccatcttcagagtttcaaaatgagttcactctggtggtgagtaatgatgtcttaagctggcttattaaaggcggaggaataagatgttcttgctttacctcacgtaccaaatatagataaggcgctggatcagcagagcctcaggcccgtgccaggacacagtcgggcctggcgatgtctgttttgtctcacgactggagggttgaaggggaagcacagcctttgcttttaagggttttcttctgggaaatccacaaaaaaaaaaaaagcatttgttcacttctcacgttgtgatgttgaaattatggcttggagttttacatttgccttttaattctctttatgggcagcatgtctgtatgtcttaggctcttggttctggaagaccaagtaaattcagtatcttttcaaattgtaaccctctggtctgggtaacacagcaagacccccatctctacaaaaaaaatttttttaagtcagccaggcatggtggtgcacacctgtagtcccagctactcaggaggctgagacgggaggatcacctgagacacgagtttatgtgtctgagacgcctgagacaggagtttatgaccatcctgggcaacataacaagagcccatctctatgacaaaatgtgaaaattagccaggtacagtggtgcacacgtgtagccccagctacttgggaggctgaggttgggggatagcccaggagttcaaggctgcagtgagctatgatggtgccactgcactccagcctgggtgacagagtgagaccctgtctcaacaaaataaaattgtaacccaaagtaagggctcaataaatgttagccactgtgattattctattattcccgtcctcgttgtaaatatttgtgtggcttggtgcctagcgtcttttgtagctgtatgtattgccaaggagaatcccaaggaaaaaaagtagaaatatggttaaagctggctgggcacagtggctcatgcctataatcccagcactttgggaggccgaggcaggcagatcacttgagtgcaggagtttgagaccagccagagcaacatagcaagaccccttctctacagtgtgctggcatttgcagtgcagccaccattgcccatggtagcgatgaggaagctgtggcttagaccaacttccagaatcactgctctggtcacacagctgctcgcaggtggcatcatgaacacacctagtctgactgttgcttaaccacgacaaactccatctccttccactttgcctggctgaggatcggatgcattacatagaaatatttgaatttggaagctgttgaaatacaggttcaggccaggcatggtggctcatgtgtgtaatcccagcactttgggaagccgaggcaggcgatcacctgaggccaggagttcgagaccagcctggccaacatggtgagaccctgtctctactaaaaatgcaaaaatcaactgggcctggtggtgcacacctgtaatcccagctactcgagaggcaggagaattgcttgaaccctggtggcggaggttgcagtgagctgagatcatgccactgcactccagcgtgggtgacagagacagattcagtctcaaaaaaaaaaaaaatgcaggttcaaggaagggagaggatgatttgtgttccgctctgcgcctcctccctggtccattcccttctccctgttggaccattgctgtgacacaggtgatctgagcatcaagaaaaaggcatttcttgcttctcagtgatattagcaagcacctgctgcttgtattcactgtgctgagttctacccatttattctctcattcagtctttacatctccctgatgaggaggcataataatatcatgcccattttatagacttgagggaactgagcccaagccattcagccagagagtaaccgagctggagttccaccaggtctgtctgctctgatagcaggcatgcctgacctccgcacctacccacttccccacttctgcagtctcatgtgtcccagggaacgcacagctggggcccctctcctaatttgcacccttcctgagccagttcagaagtcccagactgtgtctttctggctggctgtgtcactgggcccaaggatggtgctacggggctaaagatcttctacactgaccctctccactaacgggaaatcagaaaagggaacttgaagagaacattggcaccaatggttggacctagggatttgtagccacctttctaagggagatagaggacagggctaagagtcacaacttttgttctctacccttgagcaatcgaatacttgcaaagccctgtttctaaggttaaaaaaaaaaggctgggccctgtggctcacgcctgtaatcctagcactttgggaggccaaggtgggcggatcacgaggtcaggggatgagaccatcctggctaacacggtgaaaccccgtctctactaaaaatacaaaaaattagccgggtgaggtggcacatgcctgtagtcccagctactcgggaggctgaggcaggagaatggcgtgaacccgggaggtggagcttgcagtgagcccacgtctcaaaaaaaaaaaaaaaaaaaaaaaaaggaggcagctttgggggacaaaacattcagcgtggccggctctccgcatcttacagtggtagggatgaaatgcacgcgccctcatttgaaatgagaatcgcagtgcctcagttaaacagcggcctctccggatgccaagctgagatcatttccatttctgtgccgagatcggccttttgcagagatagatgggttatatttatcaccagctaacttattagcatgtgacaccagatacaccaaattgtaatctgactcataaaaggatatgtagttcatgacttgatggtgaagcaggtcagtttaaaaaaaaaaatcagatggattatggagtcaacgtttccttcagaaaacttcttcaggggtaaactggtataataggaatgtctgttcagactgttttgaaaacagttaccttgagaattttgtattcctttgacccagcaatcccacttttgaaaatctatcccaaggaaaaaaattagaaatacagttaaagccgcctgggcacagtggctcacgcctataatcccagcactttgggaggccgaagcgggcagtgcgggttgagtgcgggagtttgagaccagccagagcaacatagcgagaccctgtctctacacaaaatacaaattgtttgctgggcatggtggtgtgcaccagtagtcccagctatctgggaggccaaggcgggaggatcgcttgagccagggaggtcgaggttgtggtgggctgtgatcacaccactgcattccagcctaggtgacacagtgagaccctgtctcaaacagaaaaaaagaaatgtggccaaagctttatgaacaataatgttaattatagtgttattgatatactaaaaacaggtgggagggaacaaggctagtgtccaatatagaggaacggctaaatgatgctaaaaatcattcattcaaattattatgtaactgatattgtttcccaagaatatttactaacacagaaaagatcatgatatcacctaaagtaagaattaaagatgctgtatcaccctagtttaatgaaagaaaaatgttcaaaaatataaagacaagatgaatatatagacatacagcacaatagatgcaaatacctgcacatcacacaagggctggtgaacatgaggacactggattcttccaggcctttttctaagtcttagcagggattatttttggttggtgtgagattggcttttttctttgttatgcttttctgtgttttgcagattttctccatagagaatgttacttttttttaggcagggaacggtggctcacgcctgtaatcccagcactttgggaggctgaggcaggcagatcacctgaggtcaggagttcgagaccagcctggccaacttggtgaaacaccgtctctactaaaaatacaataaaaattatagccaggtgtggtggcaggcgcctgtagtcctagctagtagggaggctgaggcaggagaatcatttgaacctgggaggtggaggttgcagtgagctgagatcacgccactgcactccagcctgggcaacagagtgagattccatctcttaaaaaataaaataatttaaaaaaaacaagagaatgttactttttaatttgaaaacaataagaaaatgtccaagtctgcaaaatagagtctttttgaaagactcttcgtacttattaatttattcaccagacatctttaaacggaaacagtggttaagtgtgagagtttggaagtcccacagatcagaaccccagctgccgtttactcactgcagtccctgggcaagtaattcagtcatctgagtttccttgtccctacccgtgtaatgggggatctctggtacccatctcatggagctgctaaagtgattaaatgagacaaaagtatgcgagccctttgctggaacatgtttctggaatacttgctgttattagtggaaatattgccaccgtgccatgtgccagactccgtgtgaagtgtgcagagtgctaggtgggtaaaaatagcccccctccttctagaacctccaacccaaaggtgggaaggggcacacaggtaacagaaatgacagcgttgacatctggtgtgtgctgtgtaagtcatgtcatctgtgctgaaccctggggctcaggagagacgtagtggggctgtcgtgggaactgggccctacttgggagccaggatgtgggcccggcctgaagctgcagcagcagcagcagcagcaagatgtgagaatatttaggagatggaacttggttcagtgggaggagtaacccaaaaggactctagggtggtcctgagattttcttttctttttttttttttttttttgaggcggagtctcactctgttgctcagacttgagtgcagtgacacagtctcagctcactgcaccctccacctcccaggttcaagtgattcttcttcctcggcccctcaagtagctgagattacaggtgcgcaccaccatgcctggctaattttgtattttcagtagagacggggtttcaccatgttggccaggctggtctcaaactcctgggcttaagcagtctgcccacttcagcctcccaaagtgctgggattacaggcatgagccactggccagtcctgaagttttcacagaagcatgaaaacacagagagaattccttttctgtcataaggagatgatgcccttttttttttttttttttttttttttttaagagacagtattgccctgtcgcccaagctggactccagtggtacagtcgtggctcactgcagcctcgacctccctggcttaagcaatcctcccacctcagccctcctaagtagctaggactacaggctcatgccagccaccatgtctggctaatttttaaattttttatagagacacggtctggcagtgttgcctaagctggtctcaaattcctgggcttaagtgatccgcccacttcggcctcccaaaggattacaggtgtgagcaaccacgcccagcctggatgattggatggtgcctatagattcaggaaaaacagacttttcccccagaatgttttccttacctagctctatgtgtgtgcagtgtgtgtgtgtgtgtgtgtgtgtgtgtgtgtgtgtgcaagagagcgtggctaagacaagggtattcacctggcatcctcattcccaagttgccaatactcctctccccttttttcttaactcaccacctgggaagttttcctatttctctccctcctatcccagataagaagaattgccttctttcctcccagctgatttgcttttctcgtcattatatggcaaaccaggctgcactcccctcctaaggcaggcggtggttctctttgggctctgagtcctcagtgttctgcctcttcgggtgccaaccaggaaagccgccttccgcttttagagcaacgtgaagaaatcatggcagcccacgtaagatctctcattatttctgttgaaactgattctatcgagggtggagtgcattgcctttaatttctttgtttgcgtgtattttttttcccctctctctcacaagaagtatattcttttctttcctgtttgttcctgctcgatttggggaggctgctgtttccactgcctaattaatgggaaggtgttctgcggaggatttcaccgcgtacatattctctgtttggacatggtacaacctgtggacccttttaaacatagttacatgtttgactctttatagggtaataactcgattaattttgcaaggctttttagaataccattgttctcttgaaaagaacaggtttgctgttttaacaagactttaatgccatcgagatgcctcacattggcacggttgcgtaagaatcgcacggtcccatgaaatgaaattgagagagctttttccggcgcctggttggttggggcggcctccgttcggtgcttttttcatcctcgacccagtgaccaactgtgtttgccctgatgtttctttcaattccaccattccgaaatgtctccggaatctgtcgttttagcttttgcagcaaggttcgttgtgtttgtcttgcccgcttcaggtttctctaatgagattcacgtgtaaaggaggattggcaattaatcggatgactgattaattgtgagattcttattcttaccaaggaatgctatggaagtcctggcttcagataaaattctcaatgagggccagttgcagtggctcacgcctgtaagcccagcacttgaggaggccgaggtgggaggatcacttgagctcaggagtctgagaccagcctgggcaatatgacaagaccccatctctgcccaaaaagaaaaaattagctgggcatggtggcacacacttgtgatcccagatacagctacttcggaggctgaggtgggagaatctattgagcctgggaggttgaggctgcagtgagcagagatggcaccactgcactccagcctggacaacagagcaagaccccgtctcaaaaaagcaaattctcaaagaggccttaatataccttttttaatcataagctttaagagcctggtcatgcaaagataattcagtgagatgaaagattgtttatttcctactgtgcattggtcacaactttgattccacagaagggcagtgtgctgtcctaacagagctgagtgtgtggagtcttaagagcttcctccctctcagcaaatgtgtattaaatgtttctgctttgccagttccagtgccagtgccctgtgattagaaggtgagcttcaccgaggcctcctggtgttgtggagagggagccccgggaatggctggatgcagaaggtgaaggttgagatgcaggagagggagcagttagccttctggcttgggctgtggtgggtggtgccctccatgagattccaaaaaggactagtttggggaggaatgaaattggcatttggagagtgtaagatactagtggagtctccaagcagagctgcccaggagacaggctggccatgaggagagtagcattcacctggatatagatttgggagccactcaccgggagagagattccatctgtgtgtccctgggcagcgtgatcatgggaatactgcttaacctcaaatccttggctttctctgtaaagtaaatgtaataagatctccacagggtttgctgtgagggttgaacgagctcagtgcacatgaaaatgccctatacactcgaaaccagctataaatattggttattattgttaggatgctgacgttcaaatataaattgccaaaatcatttgggaagcattgcatactccattcccacatggagagttgcagggcatgtgattatctgtttgttcatttagtcacaatattgatcaatatagaacaaagcagtatattttaaaaatcaaccaggagcagccattctttgaagtgttatgcaaccattaaaaattaggtttggccaggcgcggtggctcaagcctgtaatcccagcactttgggaggccgagcaggcagatcacctgaggtcaggagttcgggactagcctggccaacatagtgaagccttgtctttactaaaaatataaaaatcaggcgtggtggcaggtgcctgtagtcccagctattccagaggctgaggcaggaagatggcttgaacccaggaggcggaggttgcatcgagccaagattgtgccactgcactccagtctgggcaacagagagagactccatctcaaaaaaaaaaaaaaaaaaattgcagagagtttgtagtacatgggtcaggcttaagcaaaaagaaagcaacttaggaagtatatatacagtattattacaactacaaaaggaacaggcagaaaaaaccctggaaggaaccatgccaaaatattaagtctcctttagggagcaggacttggagtcgtatttctttatgtttttctgtgctttaaacatactctgccatgacatattccttctgtgatcagaaaaatataaactaacagtaacagcagaacatcccttccccccaaatacaggtgggaattagatgtctgaagagctgaaaacacaaatgtatcgatttcatctttttaatatttccctgcaattcatcttgccttaatcaccgttttctctctgtccgtggaatcacagagctaactgcacagaaacggtgtgaatgaaaccaagttggccctacgtggaatctcaaatcgctctaccctttcgggatcttccgtttaagtttttggataatgaaaatttgatcttgatttcaactaaagctgttgtgtataaatctaacctttctatttagcgaaggtttttagcggtccatagaggccggagataacgaactgttacttgtcttctgtctttcccgtgtctgccatgggttctggtttgtaggcagatataaatgcagatacgtgtgcccctgtcgtgtctgaaaggatgatagaagcgagctgaagactccttcctgggagaaatggatttctcccttgcttttagaatcctcaactcctcccattcattctgagcaatagccatcataccatatttcatcaatctcagatttcttttttcttcctttttttgaaacagggtcttgctctgtcacccaggctggagttcagtggtgcaatcatagctcactgcagcctcaaactcctgggctcaagcaatcctcccacctcagcctcctgagtagctgggactgcaggtgtgcaccactgcaccaggccaatttttgtattttttgtagagacagggtcttgccatgttgcccaggctggactcaaactcctggcctcaagtgatcctcctcccaaagtgctgggattccaggcatgagccactgtgcccagcccaatctcagctttctggtttggccaagggatttactttcaagttgtaaagtaaacaacttgtgcttttctgcttttgccatctcctggttccccctgctgatgccacctctgatgccacttgtcacctttctctaaaccacccccttctctcacctggcaggaaaattccctgcctatccttcagtgaccccagcaccggtttcagtgccagaaaatgtgctgtcctccctgtatttggctcgcctgtcctccccctcactgatgttttctgctcattgggtgggggaggaatcacatgggttaggtgcccatccgtccactcctgtattccatgcgcgaccacggtggcccaaagttggattccagcatgtgatgttgaatgaggcaggcgtggctcccgtccccgggctgcacccagcagttcatcccggatccaggcctctgccttcctctactctcacctcttctcctctgcagagaagtgactgctgctggttagtagggtgggaagtggaggctggagggcatttgagagggcagagctgagttctggcctgatccagtcactcaacagcccatttcctcatctaaaaatagaataataatcaattacttagtacctgtcaacacaagcctatgtatatatatatatattttaagagaccaggtcttgctctgttgtccaggttggagtgcagtggcgtaatcatggctcactgcagcctcagctcttgggctcaagtgatcctcccacctcagcctcccgattatctgggactacaggtgtgtaccacgacatctggctaactttttaattttttatagagatgggatctcactatgttgcccaggctggttgcgaactccttacctcaagtgatcctcccacctcaccttcccaaagtgttgggattacaggcatgagccactgtgcctgggcaagccaatattttaacaggccctttacctatgtaatttcacttcaacttctcggcaaccctgtgaggtcgggagatcgggtgttcttgtcaaaggcacatcaagaaatgacaaggcggtaccgggcacagtggcttatgcctgtaatcccagtgctttgggaggccgaggcaggtggatcacctgaggttaggagttcgagaccagccttgccaacatggtgaaaccacgtctctactaaaaaatacaaaaattagcctggcgcagtggtgagcacctgtagtcccagcttctcaggaggctgaggcaggagaattgcttgaacctggggggcggaggttgcagtgagctgagatcatgacagtgcactccagcctgggcaacagagcgagactccatctcaaaaaaaaggtgaaagaaatgactgagcaggaatttgggcccaggtttcgtcaccaaattttgtatgttttagctatcattattgctgtccttgttattgatgttatcggccctgagggtataatgatgagcagaatatatcccgattctaagaagtcaagaggaaaggaagctagctttgctttatttcaagtttctcattcttttttgccgtcattcttttttgatcacaaaatgcccacctgtgctctagaaaccacgcctccattggacaggctttgggagtactggctccagtgatttgggtggttttgcactgatttctcatccagcaagcaaacctcaacaccttcagactgtccccagcaaccagaatattatcgtttcagagtttcgagggaccatagctgtcagcctgtctgtccaccctgcctggcgctggccttaattggaggatggttgcatttggaccagagcagaggcagatatctcattcctccaatgaaatacgagggcttgtgcaacaggcttcttatctcatctccacctgatcccaggagcctgattcctttccagggagcagcagatgagacttttctctttccaacaccagtgtgtgtgagcgagtgaatgagtagggtttaatggtgattaaaggcgtggtcttcattttgacaccttttgttctataacaagcctgacaaccatgaacctacttcttgccagacagaaaagtcattcccgtgccttgcccctgagcctcctcggaaatggcagagctgcacatgaggaattatgcttcctcgaacagcaacatatgagtcgtgcctcttccctaacaccgctttgcagtttgtgactataatctaatgaatccagctgacgttgatcaggtccttggtgtgggcgaggcactgtgcggcggggagggggcttccttcctttgttcctccctagtgcaaagcagtgggtatcacagacgaaactcacaagccacaaagaggttcccaggtcgagctggcctttgtgcccatgacgtctccctcccagacctgttctccttccaccatccttggttcccagtcagggcatggtggtgggggaagggcagggtcagcagggcatatggcctggccctgtcctgcagtggggttgactgcggtactgctccagaaaaatggactttgttgccagcgttaaaaaatgatgacttggccaggcgcggtggctcacgcctgtaatcccagcactttgggaggccgaggtgggcggatcacgaggtcaggagatcgagaccatcctggctaacacagtgaaaccctgtctctactaaaaatacaaaaaaaattagcggggcgtggtggcaggcgcctgtagtcccagctactcgggaggctgaggcaggagaatggcgtgaacccgggaggcagagcttgcagtgagccgagatcgcaccactgcagtccagcctgggcaacagtgtgtgactccatctcaaaaaaaaaaaaaaaaaaaaaaaaaagatgacttggagattgaaagaggttgaagagatagctaaaggcaatgtgtggacctcatttagattacagttggaaacaagccagcagaaaacgtgtttctgaaacaactggagaaattagaacagtgggtttctggatattttatgatattgaggcgttattgctattatttgtgaagtgataatagtgtttgttttgttttgttttgggacagggtctcactctgttgcccaggctggagtgcagtggcaccatcagggctcactgcagcctcaacctccccgggctcagctgatcctcttgccccaacctcccaagtagctgggactacaggtgcgcgtcaccatgcctggctaatttttgtattttttgtagaggtggtgtttcagcatgtcacccaggccccggattatagtgttttgactgtcttttttttttttttttaaaggatccttatcttttagagaattcacactgagatatttctggatcaaatgacttgatatctgagatttgcaacaattaatacagtaaatgaaacaagcctggccgagagttgatactcattgaaagcgcatgatgggcacatggggactggtgttactgtttgcttgatgtgggcttgtctttgagattttcgtagtaaggtggtattttgcacaaaaccccagctctgatttttctgggaaagtgggaaggcctggtgattgcaggctgctggagctttagatgggtgggaatgtcctaggtggcggatgtcccatggtcatgtggagggaaggatagaaagagcatggcagggggccaggtgccccgacaggtgagggccacctgcagggaacatcagaggtgtgtgcttcttgagggtcgttacccacggtctgtatctccctatattcaccaaaatacacgtgggacttcccttctgatcaggtgcacagcctaggggatcctctgggccgagcggacctgccagggaagctctcaagtggtctggatagaacaagcagggggcttctgcaacaagccggcctagctccaggacacccccatccaagagggatttgacagatccatcccagccccataacttggttcctttgcagagggatcatttggaatttttttattttattttattttattttattttggtgagatggagtctcactctgttgcccaggctggagtttagtggcgcaatctcggcttactgcaacctccacctcccgggtttgaatgattctcttgcctcagcctcctgagtagctgggattacaggtgccctccacttatgcccaggtaatttttgtatttttagtagagatggggtttcaccatgttggccaggctggtcttgaactcctgacctcaggctatccacccgcctcagcctcccaaagtgctgggattacaggcgtgagccaccgcgcccggccagaaatctttttccatttgccacacttgtgacttagccaagtgtctttttcaaagactaataaagccttcacagcttccgaaacaccgcgctagatctggtagccgcggacaatttggattccttctccagtgggaaagattcaaaactgcaggtttcagaagcctttaaaagcttcttgtctgtgtgatgttcattgaatgcaaattctttcgcaaataatggcctgcaactgctttaaagaaataaactcatcttgctgagcccgggcatgtatgcgtcaatggtgaaaaactgcaaacacacattctgttagcagaatcgtttaattaaaccacattcttgaaatggtctgcactataggaagggatgttgtgtgcaccacactttctaaaaagatatgtaaaaggtccccagaaacatataatcagaatttatcctagacaagtaatttcctctccccatgtctgtgtcctcatctgtaaaatgaggtagtggggccaggacgtctgtaaggtccttgtagtgatgctgttcacaggtgctgttacttgggggaatcataatgctctagggtttttggtttggggatttttctttgtttttttgagacagggtctccctgtgttgcccgggctggaatgcagtagtgtgatcgtagctgcctgcagcctcaacctcctgggttcaagcagctccccctgcctcagcctcccaagtagctgggactataggtacacaccaccacaactggatatttgttaaaatttttgtacagaggaggtctccctgcattgcccaggctggtctccaattccgaggctcaagtgatattcccaccttggcctcccaaaatgccaggattacaggcatgaaccactgcacctggtactagggttgtatcgtttgtcttttaaaaaatcttcacataaaagttaattgtggggtgggagggagttcctatatcaaaagtatgttgaaatacaagagtcaagaggttgagtctggggtccaggtgggtcccctggacaaccctctgcagacttgctgctgcttttgttaaagtgtctgggagtcccaagccacatggggtaggggcatcagaagagtctagaattattatttttgagacgtggtctcgccctgttgcccaggctggagtgcagtggcgcgatcttggctcaccgcagcctccgtctcccaggttcaagtgattctcctgccttagcctcctgagtagctggggttacaggcgcgtaccaccgtgcctggctaatttttgtatttttagtagagacagaattttcccacgttggccaggctggtctcaaactcctggcctcaagtgatccacctattttggcctcccaaagtgctgggattataggcatgagccaccatgcccggcctgaagagcctagaattcttcagccttctccaggatatccctgctgcctgggtgggagacaggggagagttggtagggagaggactgtgctgtggaggtatgactctgcaaggtgaccccggctcagcagctgatcagctctgtggccttgggcaggacacggggctccctgaactcctctctccacattggtaaagggtctggtcaggccagctgtgggctagtggtgagagtaacagagatactgatctgttactggaaacgccatgagctgattgctgtcattaacctccctgtactgagagttaaacaaacaggcacctaggatgggtgcagtggctcacacttgtaaccccagcactttgggaggccaaagcaggaggatcacttgaggccaggagtttgagaccagcctgggcaacatggtgaaacctcatctctacaaaaaaaaaaaatgcaaaaaattagctgagcgtggtggcgcacacctgtactttcagctacccaggaggctgaggtgggaggattgcttgagcctgggagttccaggatgcattgagccaagatcgtgccactgcactccatcctgggtgacagagcaagaccctgtctcaaaaaacaaacaaacaaaaaacagcaaaaaaaaaaaaaaaaaaaaaaaagcaggcacccagattttcctgtactgtaaagagaaaaaccttgaatttggattaggaaggtctgaccctgtcacaaacaaaagtgaccaaatcatacattttgaaattcacctcctttgacaaagccaggatcctcatgaaagagaagattctgatgtgaagtcagccctgcactttcagcctttccagcgtgcaggttgatagaatcccacactttttagcggtcgaagggaacttaagatgtagcagttatttcagagttgtgaagcagagaccaaaatagtttgaagctgaattttaagcctcttttggccagatcaaagaaacccaaactcctaaaaataccaaattagctttttaagcatagtttctatctttagttgaaaatgtgtgcagtgtatacttctggaacctgcttaaatgtatccattgaaatgaagatgtaccttgaaaaaagaggcgcctgatctgcagtaataattaagtaactttctctgcccttgactcttgccccaacgcgtatcaggattccacggtcccctttctccttcctttttcaattctgaaaccatccttgtcttcttgccggagttagcaccaaaaaaaaaaaaaaaaaaaaaaaaaagttactcttgtagtttacatgtcataaatgaaaatggatattccctcccagggcataatctgaaatatttgtatttgggtttcaaatgtgtgataagatgctctctgtggcagatcggcctttctaattgctgtgcttgttaaaattcaaattaggctttattctcttagcaaacgttgactgacagttgcagagagtggcccagaatggcactgagtgatgggtggccaggaagcctgcggtaggaaattcacaacagacctttcatagagaaacggctggccttgactttgagtccttccatcccaggtgctttagagacagagccgcctgacccttccttagcttggcccgggggtgcgttggagggggctgttcccacctgcagttcctaaaggacaaactgtctgatacaggcttcatgtggggctggccaaaccccaccgaggtttgcacacaccccaggattgcagaacctgagctcgaggagtgggacatgacctccccacgcctctgctgagtatcccagaccttcccatgtctttcttttctttctttcttttttgaaaaggagtcccattcagtcgcccaggctggagtgcagtggtacgatcttggctcactgcaaccttggcctcccaggttcaggcattgctcctgcctcagcccctcgagtagctgggattacaggcgcgtacgaccatacccggctgatttttgtctttttagtagagacagggttttaccatttggggcaggctggccttgaactcctgacctcagctgacccacctgcctcagcctcccaaagtgctaggattacaggcgtgagcccctgcacccggctgaaccttcccatttctaatcagaactgaccctgggatcaactgacctccttggagtgtagaggcatcctggttgtctggggactttgggtgggatctctgccagttttgcctgcagcagaaggaaagggaagtgacttatcttaggcacctgctttgaacaaggcactgagctgagcacgttcacatgtatctactaatttaatcctgacaacagtcctgaaaaagatactttccccattttccatctggggagactgaggctcagagaggtcactggcctgcccagtatggcgctgccagcaagggttgagctcatattgagtctgggtcggtgtgaccctacagccatgcccttgacactatgccattcctgccctcctggctggttgtgttctgctcacttccaagaatgatttccaatggcttgcaaagttacagttagcacagtatgacaagcaaggcatgagactgggagtgagtgggaacgaagaggaaagaaagtgagaggaggctgggcatggtggctcacacctgtaatcccagcactttgggagaccaaggcaggaggatcactggagcccaggagttcaaggtcagcctgggcaacatagggagacccaatctctattgtaaaaataaattgtaaataaagtgagaggaaaaggcagttagaaccagaattagacaactatccaaagttccccaggccctgtgtactttgtaaagatgagatacagacttgattgtgagcttcccagcaaccaatgcaaaaagggcaaccagataagtcatgtgacttacgctgtccacaagctcaaaacaaagcatgtgttgagggaaagcacagctcctctggtgttggcaaaaaaaattctccctaaagatcctcgtaaaaagaagtcacttggtttcattgccggttacaagttgctggcaaccaagtgccactggcaggtatcttacagcttaatagaagcagcattacattggtctaaaagaagacaagagaattacaggcccatttttaggagtggatacacctctttctataggtagaggaacttctgtctggatttgtgagttgggtgatttcagatactgatttatttttatttatttatttattttgagacagagtctcgctctttcgcccaggtgggactgcagtggcgctatcttggctcactgcaagctccgcctcccgggttcacgccattctcctgcctcagcctcccaagacgctgggactacaggcgcctgccaccacgcccagctaattttttgtatttttagtagagacggggtttcaccgtgttagccaggatggtctcgatctcctgacatcgtgatccgcctgcctccgcctcccaaagtgctgggattacaggcgtgagccaccgtgcccgggccagatcaactgatgttttgagttcagatacagagtaaatgtagcttgtaaagtactggtcattagaaccagagaatgaactctgtccctcttttaaatctggttggtttagtctttttagacacataccgttcggggacaaagagatcgatcagaattttcttgcctcctcggacggcatctgacctggctaggttgcggggatctgttggagagagaagcgtgtcatggatcccgcatcgaaaacagccttgaagagggccaggagcacggaggacctggggagggccctgaccactggacacatctgccctttgctcctcctttttgtctctgctggtggccctttctgctgtattcacgcgccctcaccacctcctgtgtattcgtgtgctggagttcagccgccaaggtggagagagactccctgtcggggaaggactccggccccaatgcctcctcctccaggccaggccgccatggtgggtgggaagagaggccactcctagagaaagagacactgtcagtaggtgtcaggaggtgtcccgggagctcgccgcgtggtaaccaacagacacagcccttcttggcattcaaagttgcaccctgatgcctgtgagggagtcgtgactttctgttaccactgacccagggcagagttttaaacagtgaccttaaggcgaaaagctccagatctcgttactgaccagtgcagccagccactgccttccttcctttttgattctaaaaatgacactcgggttttagagggttgcttttcaggcagccgaaatccccgcatgcaccttctcgtacatttcaggagagaagaatcaagtccatccacggtatccttgcccaggtaccggtatccatcagagcgtgattggggtttcagcagagccaggcctgcttttcctggcagaggctgggcccctttagatttttcttgtagattttgcttgagcctcccagcccttccttgctcagcacctgtgacccactgggtcacagtgacccacatcccatggctctgaccgcagctggactcatctcacactcacgttcatcacggctcccagaaggcacgtgtttttaatgagaggctcatttccaccactgccccccagccctccgcagcaagccagtgcaacgccaggacagtctgctgacaggggaattggagactggagggagcaagttttacctttttggtttgaccatttaaattgaagtcatgcatacagggaaagttatgcatatagaaaaatgtacacttcatactgcgtgcattcaattaatttgcgccaaatgaatgcacccgtgtcccctgcacccagatggaaaatgccaccagcacccttaatagcccccacctggacccctgaattggagtgaattttgaaagaagagggaaagaaagtgacatgtcccaattagaacatatgggacaggcactttctatactgtccaccttgccccagattctttttctttttctttttcttttttttttttttttgagacggagtctcacactgtcgcctgggctggagtgcagtgtcatgatctcagctcacggcaacctccacctcccaggttcaagagattctcctacctcagcctcccgagtagctgggattacaggtgtccgccaccatgcctggctaattttttgtatttttagtagagacggggtttcactatgttggccaggctggtctggaactcctgacctcgtgatccactcgcctcagcctcccaaagtgttaggattacaggcgtgaaccactgcgcccggcccagattcttttttttttttttgagatagaatctggctctgtcacccaggctggagtgcggtggcacaatctcactgcaacgtccacctccctgggctcaagtaatgctctcacctcagcctcccaagtatcaaattctcattttaaaaattaagaatcagacccaaaaagaacaaatgacttgaccatgactgaggccacagagccgaaaatgtccccatcctggagtcttactgtggcacactctcatcttaaccacacactctagttttatcctctctgtgtctttcatagattatcaggaagcgaaataacctgttaatattttcaaaagttcttatgaaatgtgaagtgctgtataatgattaagatagaaaggagaaactaggaaacgagagcttttaatcctagcttacaggaaattctaactagtaggaaatctaattcaggcagcgctgggaaacatcacaggctatgagatgaaagtcagctaaattgggatctaattctataatctaaatatagatgtagatatattacaggttggccttttcagctggagagagtatcattcactccaaaagtgccttttgtatcacagagaagagcgcagccaggggtgatatcagctgaggaagggggcgggcagcttggcgtgaggggctttcattcattccttagtcatctctattttcttaaattttatagtaggaattatttgtgcgttgtatgtataataaacacatggaaaagacaagagcgaggaaggcatctcaggagtgtttttgggaaggaggctgtcatggcatgtgggcagagggaggtctgggaatgggatttgctgggtcagaaagatgtccatgttctttgccaatttggcatcagaaatggcccacaccagccaggtgtggtggctcatacctctaatcccagcactttgggaggccgaggtgggtggatcaactgaggtcaggggttcgagaccagcctggccaacatggcaaaacctcatcgtccccactaaaaatacaaaacttagccgggcgtgatgggaggtgcctgtaatctcagctgctcaggaggctgaggcaggagaatcccttgaacccgagagatggaggttgcagtgagtcgcgattgtgccactgtactccagcctgggcaacagagcaagactctgtctcaaaaggaaaaaaaaagagagagagagagagaaaagaaaaggctcacgcctgtaatctcagcactttgggaggctaaggcaggaggagcttgagaccagcctgggcaacatagtgagacctccttatctctacaaaaaatgaatttttttttttttaatcagctaggcatggtggcatgtgcttgtagtcccagctactcaggaagctgaggtgggaggatcacttgagcccaggagttcgaggctgcagtgagctatgattgtgtcatgtactccaacctgggtgacagaacgagaccccgtctctaaaagaaaaaagaaaatgcctgtttcagttgtcactcctcaccagtgaggcatgggagtgttctcttcctccaaacctcactaaccctggataatggcattgtgataaattttccactggtcaaaaaatatatattgccttaaactcaaaactcgtccatcaacagtgaggttggctgtctttccgtgtgtttgttagccagtggtatctcctgtgtaaattaccttttgacatcctttgtttattttggttggtcttttacctcgtcgtcatcttactcacttttaaagagcatgaattaaggccgggcacagctgctcacgcctgtaaccccagcactttgggaggccaaggtgggtggatcacctgaggtcaggagttccagaccagcctggccaacatggtgaaaccccgtctctactaaaattagccaggcgttgtgatggatgcctgtaatcccagctacttgggaggctgaggcagggagaatcacttgaacctgggaggtgaagattgcagtgagccgagatcacaccactgcactccaacctgggcacagagagagaccccatctctaaaacaaacaaaaaaccacagtatgaattaattatttctctcttacatgttgtagaaatttttcccaaatctaccattcattttgtaaacataaactatatttctgtactctcttatagtaattgtagatttctagtgtttcacttggtttttgaatcgacaacagttttgtgtgtagggtattgtagtgtaagggatctgttttttcccccaggcagatagctcattttcccaatgcaatattcctttaaatattctgaataaaagaaaattttaaaaatcatttttgagcgatgggaaatgtgaaccaaaaatatgcataaggaatttttgattgaaaaacccagacgggggcaggagtttgaaatgaacttcccctaaaagccaaaacttgtagaggtggcagcctgagggctttccagagagctgtaattgactgtttctcccatcagccactctcctctttctcataacttttttgggcagccattaaagatctgatgacgagtgtgaatgtggcagcattttggcattttggatggtggcataattgcacatattgaaaaactctaaatttacatcggtggatccagtgcgtctcattatactggaggtgtgaaaactccatgtgcctctttgaacaattgtcctgctctgtcacagttcaggggaaacaaaagtagctccaacttcccgagatttaaatttgactttattccatttagttgatattgtaactagaatttgaatagtcttttccctttctgattttttttttttttttttttttttttttggagatgtagtttcgttcttgttacccaggctggagtgtcgtggcatgatttcagcttgctgcaatctccacctcccaggttcaagcagttctcctgcctcagcctcccaagtagctgggattacaggtgtgtaccaccacacccggctaatttttgtatatttagtagagatggggcttcaccatgttggccaggctggtcttgaactcctgacctcaggtgatcctcccgcctcggcctcccaaagtgctaggattacaggcgtgagccactgcacccagcacccttcctgatttccatttccgcttttatctctccactcccgaagatgtatcaacccacaaggaacttccttccagcccttacttaaaacattgctctttttccagctccagatattccctacattggctgccactcctccttgtctctgttcagtcttggaaaattggtttggtccaagctgaagctattctttgaagaaataccattatttttaaataaaaggattccccagcctggacagtgtagcaagaccccatctctaccaaaaaatcaaaactttagccaggcatgatggtgcacacctgtagtcccagctatttgggagggtgatgcaagagaatggtttgagcccaagagatcgaggctgcaggttagctatgatcgtgccactgtactccagcctgggcaacagagtgaaaccgtggctcaaaataaataaataacataaaaagattctcctttgagagaatcgcttgaacccaggaggcagaggctgcagtgagtcgagattgcaccactgcactctagcctgggtgacagagtgagactctgctcaaaaaataataataataaataaataaaaaagattcctccttccaggagccaagaactaggaatttcaagctgcaatcttgctttttaagcatggttatatatggggggtcagcagaatgtgtgaaaattattgaaaagtaaagcatgagatgtgactgagctcttgagagcagaccactttccccttcttaaaacgttttttttttccctgacccctgtctgagatacaggctctcctggttcggcccaccttgcccatcactctgctgggtccccactcgcgccctgcacctgaggttagagggcacataagtctcggggacctgccctttgatatctacaagaccctgtcctcaggggatcccatcgactctcgtggcttaaaataccatccacagaaggatggcgtctatatttatattaacccaaatattcaactgaatattcaacatctctacttggaaagacatctccggcttcacatggcttcaaaagagaactgttgacccctcccacacacaccgcctgcaccaccaatcccagtccccctgtcacctcgggaaatggcgtcaccacccaggggctgctcaggctaaaacctaggtgtgccctggggctccccctcctctcccccgacatgcctggtccaccagcaagcccgtccttcctcctggatacacctgggctcccagctacacgctgtcaccttggcccaagccactgtcatggccaccccaccaccacttccgttcttggctgccttctgtccattctctttccccagcggcctcagttttatttctaacgaatgcagttcagatctttccgtctccctgctagaccctctgatgtctttccatccaaccttccacattctgtgaccccacgtcgccctcactggctgggccacggcccctctagccccggtcttcacccttgaacctgcctagcctctgtcctcctcctctgcgccccgtggcttcttccactttcttccacctggctcacccggaattccagctacttgtgctcttcctgtcacacattgcctggtgtgtcatttccatctctgtctacctttccctcctagaatgccattcccatgagagcactttcaggccacttcacggcgtacgtccagccccaggcacagagcccggggtatcataggtgcacagtaaacatctgttgatgggctggctggattctatgtgggaagcataatgaccagtggtcacaaattactggggccagaggggcgctgcctggtgttaaccgcctggtgcctgccctacctttaaagccaagagtgtccatttaatgagcaagaagcagaaatcctgggcaagcagtgcagatgtaggctctcgggaacatgttgaccactcagaaaaccttccaggaggtgagtaccaggagatggaggtgctctagactgtgatgctgggaaaggattgtgggctagaaaaagggctccctagggccggcatatgggccactgggtggaagaggggctctgagaccctcaccctggagcaggtcatcacccacaccgaaggaatgaagcgtgaattcggtcacgcttaaaatgttgaattgttggcaaaagcccaagttaatgaaatagcatggaaaatggatgtgatgagatttttgaattgtaattagattaacattgtcactagttatcagtctgatatatcttataaatcaaacgttgggttgatttatcttttatcacttctagggacttactcctaacagtaactcacaaaccagccccaaatcagagctggtaggatgggctcccagctatctttaggaggtttgttggtttggggaagacagctcccccttggcagggctcaggtgttttctttcttttttcttttttttttgagacggagtcttgctctgtcatccaggctggagtgtagtagcacaatgtcggttcactgcaacctccacctcctgagttcaagcaattctcatgcctcagcctcccgagtagctggcactacaggtgcccaccaccatgcccagctaatttttgtatttttaatagagatagggttttaccatgttaacaggccaggctggtcacgaactcctgaccttaggtgatccacccgccttggcctcccaaagtgctgggattacaggcgtgagccaccgtgtccggctgggtgttttatttcttcgtctgttattcaggaactttgtttccagcgctgtgagtatgagtacaggcccagggctgggtgacagagtgcggagagcggggccctacccttgagctgtttctggaagggctcccagccagcaccgggcttagggagcagtgccctgcagtgtcattctgggccagggaggttgtgatgaatattattctcaacagagggtccccagggcagtgatgccactactcaggatcttacagaagaagaaccttcaggctgggtgtgggggctcacacctggaatcccagcactttgggaggccaaagtgggaggattgcttgagcccaggagttcgagaccagcctgggcaacatagcaagaccctgtttctccaaaaaaaatgtttaaaaagtagctgagcatggtggcatgcacctgtggtcccagctactggggaagctgaggtgggaggattgctccacccgagaggtcgaggctgcagtcagctgtgattgtgtcactgcagtccagcctgggcgacagagggagaccctgtttccaattaaaacaataaaaatcttcattttgaagaatctgaccagttctctacctggcacttgagtgaaaaatgacacaatccaaagtaggtggcagattggttctcactcaggcagaccctggagacacctctcccgcttctgactcaggggagagtgcggtgacataaaccaccttcttctgctctaggccagcttgtaactgttcagccagccagccgtctcctaactctgtgacccccggcccaagaacagggctcctgaaggccccgagaaccagcccgccgtccgcacggatgtacctggaagccacagtgccccacaccccgtgggactttctcccgaacacagcacctgcgcttcctgactcctctctctgaatctggcctttgagttcaatgtcctgggaacttaactctagggatgctctttccccctttagctaccgagtcacatgctgcgtctttggaaatttcaggcaatatttagtttggtgcaaaagtcattgtggtttttgcaattaattgcaaaaataataaatggaaaaatgaatttgtggacatcaggcttgcctagggagatgacctagggagaggcctcttttggcatagctcctgaacagggagaggtcctgacatgaataccccccgttttgtgaatcctgagccagtactgtgtccccggccccctcctcccccaacctatacacacgcctcactttcccttgcaggacgttttctaccacagttcctctctcctgacatagtatgtgtttgtttcttacttgtcttgccgcatgaggatgtaagttgcctgaattcaaaaacatgtcttcttttttgtgaatgaaagagtggctggcatgtagcaggtactgaaattatttgtagagtgaatgataaatctcagttcagggcactcagtgtggcctgggctacgtggaatagccaattggtggccacagagagtggccagccattcccaggctggcaatgtgagtcttagccactctcttttacagataatgtgcttattaaaatgatatcccaggcattccccagtggtgtttgaatcgtgaatgcaaatgtcagaggctctgaagtttaaagtctttttttttttttgagacggagtctcgctctgtcgcccaggctggagtacagcagtgcgatctcggctctgcaacctccgcctccctggttcaggcgattctcctgcctccgtctcctgagtagctgggattacaggcaagcaccaccacgcccagctaatgtttgtatttttagaagaaacggggtttcaccatgttggccaggctggttttgaactcttgacctcaagtgatctgccgccttggcctcccaaagtgctgggattacaggcgtgagccaccgcacctggccaggtttcaagtcttgactctaataaaaccagggaggtttcgctcagccacataagtgggagggaaaattaactgttgctttctgtattcaccaagatggcctaaaataagcaagcagaaaagggaagaaagaaaaccaaacccatgaggttgtccaagtcgatcttggcaggtattttcttgcctgttgattgctagagtttccctctacctgcattgcaggctgaaatgtatgactcagccctgaccaataacatagcagtaaaaagtagtttcccctgagagctttctcttcctccatagctgtgactgctgacatcttccactgtaagtgagaaaagttgagtgtgccctgctgcctcgtttttctcaccaaggtgttatgagctggtagggaaggccaggagctagggcagcagctttagaattagtgcaagagacaggaggacaagtcactgggtctcctgaatttcctcacctgcaaaacagggacagtttttaaatttcttttttttttctttttttcttttttgtttgagatggagtcttgctctgtcgcccaggctggagtactgtgttgtgatcttggcttactgcaacctctgcctcccaggcttaggtgattctcatgcctcagcctcctgagtagctgggattacagatgcgggccaccatgcccggctaatttttgtatttttagcagagatgaggtttcaccatgttggttaggctggtcttgaactcctggcctgaaacgatctgcctgcctcggcctctcaaagtgctgggattacaggtgtgagccaacagggacttttttttttttattatactttaagttctaggatacatgtgcacaacgtgcaggtttgttacatatgtatatatgtaccatgttggtgtgctgcacccattaactcgtcatttacattaggtatatctcctaatgctatccctcccccctccccccaccccatgacaagccccggtgtgtgatgttctccttccccaacagggacagttttaatcaatcccctttctgggtggtgtcaggacacccacagaggtgtgggtctaagcgctttgtgagtgtccacgtcctgtgcctaaggaaagcactagtcattcattcattcacccaacagttcctgacggcccacctcaacaggaaggaatattatacagccactaaaatgtaaaatcaccagtgctgttcagaaggacggagatgtttatgtcattggctgtgtgaccaaaagaaaaagttctgctggggatgtgggatgggcatatacgtgttttgaatataagatctttctttaatgctgttatatttggtctccataaaataattattctttgggtgacaacctcttagaaaaagaaagacaaaagcagctatttgcataaacctcagcccaggtgtggtctccagccccaggaaacttctctaacacccctcccatcctcccaccagtggttcctccctcggtggcatgaggtggttcagtttttttcctctgtgcccaccctggggtgccctgggcccatggccactgactgcagtgaacaattatgtgtgagtctgttagttcatttgcattgctataaagaaatacccgaggctgagtaatttatgaagaaaagaggtttacttggcccatggttctgcaggttgtacaagaagcatgacgccagcatctgctgctggtgaggcctcaggaagcttccagtcatgatggaaggcaaagaggacttgacatatcacatggggagagagagagtgagaagggggaggtcccagactcttttaaacaaccagatctcacaagaactcagagcaagaattcactcattaccaggaggtgggcaccaagccattcatgagcaatctgccctcatggcccaaacacctcccaccaggccccacctccaacactggggatcacatttcaacatgaaatttggaggggacactagccgggtgtggtggcatgtacctgtaatctcagttactcaggaggctgaggcaggaaaatcgcttgaacccgggaggcagaggttacagtgagctgagattgtgccactgcactacagcctgggtgacagagctgagactgcaccactgcactccagcctgggtgacagagcaagactctgtccccccccaaaaaaaaaaaaatatatatatatatatatatatatatatatatatatatatacacacacacatatatatatgtgtgtgtgtgtgtgtgtgtgtgtgttaggggacagatgtccaaagtgtgtcagtgtccatcatggctattagactgtcaggcattgaatatgggcccatgttttatttctctttatttcctcattgttgaacacatgggtgtgcctcctatggatgggaccagtggctgactcacctttccaaacttgcatcctgatgatctgtaaagtgtacccaccctgtaagattgtcgtgggacaatgtagataaaaacctcgatatacagcctagtacacaaaggacggtgtaaatattctcttccgtgcttcgtagatttcatttttgaacgctcagattgttctccggcaaaaaaaaaaaaaaaaaaaagtgcttgcagtgagaacctgccctgcactctcaggcgagctgttgggtgcaagtcctgcaggactgagctctgaaggccacccacaccctgggttgtgcttggatgatggcatccctcctggcacaagcgcagatgggcagtcgggagggaacatcagcctgggaaaactagatgtcagtgaaaaatgctggaggtggctggcgttcgcaaaactcagtcgtaaaaaacagcacgttctcagtacaaaatgagcactgttaaaaataaaccgcgcaagaagaaatatatgaatacgagggcatggcaaacagttttgcaaggtattaagatcgcattaatcttaattttattatatattaaagtttctaacttttcaaataatgcagttttcgttgttttaaaacgtctgagaattatagagctatttggtgtggctctcaggcaaggactcctgccatttattggggccctggttttatttaatagccagatgaatggaatagttaataaaagaaatattgctttattccctgacatttatgtccttggtttccaataaagaattgaaattatgaatagttgatggtttaaattgatgttttatgttgaacgctagctataatttgccctctgaggattgtaataccgagaaacagatggtttctcacagtaacaaattgctatgtgtatacacgctatagtcttggctttcagatactttcacctttggttctgagctgctctgcagacgggagaggggggtcgtgcggggagatcagcctctggaggaaggggtttcctgccctgtgggggagacacagacaggccctgggggttcagggaaactggggaaatgtagctagcctggcatggtgtcagtacctggggccaagaggagcgttctgtccacgatcatggtggcagctgcaaggtagtgcctgcaggactgctgtgcatgtggctgtttgacaccatgccgtgctgcaaactccacatcttcctagaacaaccaggagaatgccgtggagacttgttgccagatttttgcagttgccctgcagtggagaggttaagagcttggactccggagccaggtggctgggccactttgggggaagtttcccaaattcccacatctcagtttcctcatctgtaaaatgtgcataagagcaaaagccaccaccctgttttgaggattcagtaaaaccatccctctaacacaacactgagcccagtgccgggtatggtgtcagtgtctgccaggtaatggtgtaacgaaaattacaaagcagattgatgtggtgtgattcttgacgttacaaaagcttccttgtttttcagagggagttcccacaggggttctttagacaggcagtgcattaaggttgcagaaatttactttccagaaggttttaaaggaacgcagcttcaatggcagcaaggtacctgaaacaggaacccttccagagtgtctctgttttgttggcctttgagacctgccgcttctgactgcggggacctgggctgccccagatctgtctgtcagaagcctggagttgttaagctggtgaaatttaacaccactgtaaagagcccctcacagacaattcaggaacgcttacagatagaaaccggtcctggttttaaggtgtaattttgcacaagtgttaacaacaagagatggaattggtaacgaggcactggggtcggatcttcatatttttgtcacatttcatcggtgagatcagtaggtctgtctcccctaagaggagtgtggaatttagtgtttttccttttttgggctgtgacccaagagcttgttttcaagatatgtatttatttagaatacaaggctcttttccataaggaaagaaaatgttacagaaatgagctctcagttaattgaataagaaacctgttcgtctcatgactcacttaagagagagctggcagcccttcctgaatgcctattacaggcggcactgtgtccttttacttaatcttcccaaggaggatgagggttgcaggctccccaggcccatcgctgtgttggtgagtgacagagcctctgtaaaggaatggggatgagctctgagcccttttcccgtgggctctgctgcctggaggcatgccctccctcggcttgtcttccagctctcgcacagaaccaagtgttaactggtggtggtttggagacgagaggaaatggaccgtaaggaccattgagttggcataaggagaccagggcccaactccggaccctaccagagcagagtctttctcctctgtaatgtgagactgtagagctctagaatgttccttctccaactcagagctgatgctgtcagggccctgctgcagggtccttcagtggctccctgtggcctgaaggacaagccagctcctgccctggaagccgtggggatgtggtcctagcctgtgctcctgcctcgctcacctccctggaacaccagggccacctctctgggctcctcctgtgccccagtctgctcctgccacccctgtcccaccgtgcttcctccctccctgtgcctcagctcaggccttgccacctggagctctgacctcgtccgtcttggaatgaggcacctgcatgggtagcccatgggtagagttgcagtcatctgtttgctttcgattcactcccgcatcccgacacagtgcccagcacatcatcgatgaatgagtgtggggcaaatgcttgcacagaagtccgtgcgtgagccacgacggtaaacagaggcgctcctcttgtcctaatgtggaactccccaagctacgggaaaggggtgcatatggaccgctgctcactcacggctcagatacttccacggtaatgggttggcgacagtgactcagcttctcataggttcaagcggaagaaatggtgagtcctggagcactgcttgctttgaagtctgtttcagactagggtcatgtttcaaagtttttgaatttcttttttattcaaaagacatttgatgagttgactattgggggaaccttgaccccggtgactccgtgggacaggggatacccccggggtcccttataagcctgctgactcaccgcctgttctccatcttctgtcttccacattagaagcaagggcggggacattgcctttcccggccgctgcggtgtcctggcgcagggcacgtgcctgagggcccttggtcatccgagggaggactgcaccagggacatcagagtgctgatcttacaggaaacggcaaatgaatggaattggtctgactccatattactccttacttagatgtaaaacaaatacacatgatttttcatcctagaagaaagtctaaacgaactcttgacaaaaacagccaagttcagagaaagctgactctgttggtgtaagaagcgttttttcaggctgggctgctggctcatgcctgtaatctcagcactttgggaggccgaggcaggtggatcacttgaggtcaggagttcgagaccagcctggccaacatggggaaacctcgtctctactaaaaatagaaaaattagctgggcgtggtggcgcatgcctgtaatcccagctacttgggagactgaggcaggagaatcacttgaacccgggaggcagaggttgcagtgagctgagatcacgcactgcactccagcctgggcaacagagcgagaatctgtttcaaaaaaaaaaagaagaagaagctgttctccgtgagtcagccccggtgtctgataagtgtctgcagctgacagctcagagctggtgtcaacccactttggaggctggggtgggaggcaagaaacccagacagaacccctcctggctgcaaaacctccaggcttaactgtggcgcccactccatggtgggtcttaactctcctgaaaacacttcatgggctgtgggcctctcgggtgcttctgcgccagctcttcctcttcacctcctgccacagatctgtgtccccaggctctcctgtgtgtctccctgctcctcctttccctccaggtccgattccacagccctgggctgcctttccacctctgccttctctggggtatgtcctcgcctctcctgtcaccattgtcctcagggatcttccagctttccaggcatttggaaagaggcctccataccttgatgtggcctcccaggttccttgcgacagagtcctgcgtcgggataccaggggctgggcgcggtggttcatacctgttatctcagcactttgggaggccaagacaggaggattgcttgaggccaggagtttgagccagcctcggcagcataatgagattccatctctacaaaaaaataaaatttagccaagtgtggtggcatgcacctgtggtcccagctactcggaaggccaaggcaggaggattgcttcagtcctggaggttgaggctgcagtaagctataatcgtgccattccagcctgggaaacagggtgagatcctgtctcaaaaaaaaaataataataataataataatatttgtaggggaaggacactcagatttcctactggaagcaaggcttcctcattccatcagattctgctcctcctccaaggctcggctcaggggcctgcccctccatgaaccttcccagccctcagcccccttccttcctattcccccagcaccgacgtcacctcatcctgcccgactctgtagcatgcaggcctccgtcctccacccagctgcagaaccggagacctcaggtggtatctggttccacgtgtccccaatggcacctcgcctggaacgatgtctgcgccgaccagtgataacaatcgaaatagcaggcgtggctgaccgtgtgccgaggctcggcgtgccgcactggccagccgtgatttcatctcagcctctagcatcctgctggggtaggttaataatccctggatttctcagatgggaaatgttaggaaagtctgtaagcccccatggaaggtcccggagcccaaattcaaacccgagtggagcgttctgttgcttcactgtgctctggtgtgaattttaatgtaaggccctggcatttaagagctcgaagacaccatggaggtggagagctcagccctgtcattggatggaagctgagactggtgagattctcaccggggcttttgcagggagtttgggggaattttgaaggtggtacaggtgttctgaccccaacaccatctcctccagctgggccacacacttatttcctgctcctacccccgtccttcccaccccttggattctgggtgtacagaagagtgggcacatgctaaggtcagccctgggttagcctcatggacaaggtgggcctggagcaggaacccgcctgatagaagacactcaaagtctgtccgtacacgctcggtgtgggcatcgcttgcacgcaggtgcagcttttgctgtgggaaaccactttaaatgaattgatagcctcaccacagtggagccatggcccgactgtggagagactccattgtagagaaatatttgagtgaaaggtttcatgtcagaatagcatctgcatgcaaataagaggcatgggcgggtgcagtggctcacacctgtaattccagctacttgagaggcagaggcaagatgatctcttgaacccgggattttgagaccagcctggacaacatggtaagaccccatctcttaaggaaaaaaaaaaggtttaaattagctgggcgtggtagtccccgtagatgaagttatttgggaagctgaggcaaaaggattgcttgagccctggagttcaaggcagtagtgagctatgattgtgccactgcattccagactgggcaacagagccagaccccatctcttttgtttgtttgtttgtttgtttgtttgttttgtttttttgagatggaatctcacccaggctggagtgcagtggtgagatcttggttcactgcaacctccgcctcctgggttcaagcgattctcctgcctcagcctcccaagtagctgggattacaagtgcccaccaccatgtctggctaatttctgtatttttagtagagatggggtttcaccatgttggccaggctgatcgtgaactcctgacttcaagtgacgctcccacctcggcctcccaaagtgctgggattacaggtgtgagtcaccgcgcctggcccagaccccatctctttaaaacaaaaaagtacatgggataaatggggaaaacactcttgagacaagaccaaaacatacagtggctgctaaatgtcagtgccatgagcccagggttctcctacatccccttccgtggtcagggaggactgctgggctctgtgtcttctgtgattctcccctggctctgagccctttgcacctgcaactcacagcgccgctcaggtccctgggggtaaagtgccataggataaaagccacaggagggttttgaaatgctcttttcctctcagatatgtatttccgcatctttacggagtctcatcaacgctttttaaacctcccctgggatttgaaccagcgcccatagatacaggtggcttgtcaggtcagctaggtgctgctactgaggcagcatctgtccctagccccgcacccacaggttcagaaggggaacgcttcccccgggtggcttatgagatccagtacttctagtttcacttctttaaaaataccgtaaaaaagaaaaaggctgtcaaaacacaagcagtgtttgaaacgaagctttgtaggtccccctacaccaccaccgtcgtgggcagcatagcggatgagttctgggacaccagctaaaatgtgggcaagagaagccagggcgcgtagcagatgtgtgtgtgtatctttatgggattcaagtcatgtctctgttttgttgaccaacttccgctagaattcatagccatctagcctatgtattggatttttatttctgtgatgtctgcttcttttaaaaatatcagttggggccgggtgtggtggctcatgcctgtaatcacagcactttgggtgaccgaggggggtggatcacttgaggtcaggagttccagacccacctggccaatatggccaaaccctgtctctactaaaaataccaaaattagctggacgtggtggtgtgcacctgtaatcccagctactcgggaggctgaggcaggagaatcacttgaacccgggaggcagaggttgcagtgagctgagatcgcgccactgcacttcagcctggggaacagagtgagacttcatctcaaaaaaaaaaaaaaaaaaatcagttagtagccaggcaccatgcacacacctatagtcccagccactcaggaggctggaggatcacttgagttcaggagttcaagaccagtctgggcaacatagcaagacctcatctctacaaaaaataaaaaattagcagggcatggtggcacatgcctggagtcccagctccttgggggaggcaggagcatctcttgagcccaggagtccgagaccaacttgggcaacatagtgagattccgtttcaaaaatatgtatcagtaggttaatctagactttgtttacatgggccaagtggccaaggtcacatcttagagttgtggactgtataatcaggtaagtgtggctacagtcacagaaagtcagggtagaaagaggcttggaggggggtgcacttcttctagccagagctttcctactgagctccttaaagcacaggggaaagtgggacggggttggggggcaacctaaaacccaccccctcccatcttcaaccagtgcgaccctgtttttacctgctcagcagtattgtgcatccctgtaaaattttatttgaaaatggccttctgcagttaaaactacaaaaaaaggttgaaagtggccaacttaaactccactctgtttcttttttgattggggagactggtgtgcatagaagggaggtgtcagctaacgagactgttacctcaccacagatgcccacccgtgggtgatggagctcccaagtcctgggccacaccctacgtgccccatgcccagcaagttgggtgggggaggggtcagtacatgtttgtaagataaagaaaaacatccttcccaatcagccgtattacccagagggtgatactgatttagatcttatttcagtttggttagagaagctcaggtaccagtgagcagaagtctggccattgtggtggcttctggaagatgatgtgccatactgttagcaggggtgcaatttggggtgtgaggccaccagagctttgatttccgcccccgccgcccccctccaacccccgccccgccggattatttggagtttttttattgttgttcatggtaattacctgctattagacaacaatctagttccatttgcaatagggaataatacgtctgtgacacagtctccagacttagggagcctctggccaccccgagggggccctggtcattctgctgctggtcatgcctagctctgggtggccgactaggtggcctgggcgggagggtccactctttgcctttataaaaagaagggcttgggccaggcgttgtggttcatgcctgtaatcccagcactttgagaggccaaagcaggaggatcaccttaggtcaggagttcaagaccagcctgaccaacatggcaaaaccccgtctctactaaaaaatacaaaagttagccgggtgtgtggtgggtaccagtaatcctagttactcgtgaggctgaggcaggagaatcgcttgaacccgggaggtagaggttgcagtgagccgaggttgcaccattgcactccagcctgggtgacagagtgtgactccgtctcaaaaataaataaataaataaataaataagataacaaggcgtgctggagatggccacaggcctccagcagccgcaccatcagagaaatggagtcagagagagctgcagctgctctgatggggggtgggagtatgcaggatcctctgggggtggctcaggcctcccaggggagcacttaccttttcatttcatagtatgtcggagctgctgatgcaggaataaagcaaagtgcctggcactctgcgcgactgctattttttcattcattcatatatttgtccttcctctacacatgtatggcagattaacaaaagcacctccacggcctagctatgtggcccccacgggtttcttagcctctctgagcaagttggacagggctgccttttcctctccctaactctgacttctgtcccagcctcttccatctaatgtcagccctcatccctgcctgcccctcccggtgcagactgggacattctcaggctgtttgagccaccccttcatcctctgtgcttttccctggcatcctggactcccttctccccttcatggtgctcctaggccattcccagcgctcctgttactctctctgtcctcccagccccaaacccgtccagctctgtatccatctgcctggctgccattcatgctgcagacgtagcactcccagagcccatctgtctccacacattgaggcttccagccccctaaccccggtagtggccacagtgcccagtgggccaccccagccaagcccaagagtggccacatgggagcccttcttccatctccctcccctcatccacacattaccaagtcttgccaatttcatctcctgaggacctcagcttctgtcattctctccccattatactgcagttgccaccgttatttctctcctagaccttggctggcattacttggacattcatttctttggaatctcttggccagctttgcacacctttaactagactaagaagatttgaggccaggggcagtagctcatgcctctaatccccagcagtttgggaggccgaggtgggcagatcacctgaggttaggagtttgagacctacctgggcaacatggtaccccgtctctattaaaaatacaaaaattagccaggtgtggtggcacacgcctgtaatcccagctactcgggaggctgaggcaggagaatcgcttaaacccaggaggtggaggccgcagtgagccaagattgtgccattgcactctagcctgggtgacagagcgagactccgtctcaaacaacagcaacaaaaaaggaaatatgagctcccttcccagatccgtgcctctggacctgggctgaaggcttctactccctccattgtcaccttcgggaatctgcttgttaccttcctcccaagaatgttccagaaggtcttggtttaatttctggagggcattcaagaactcagtcatctcacgtgtctagaagagaaacattaaggccaggcacggtggcttatgtcggtaatcccagcactttggaaggctgaagcaggaggaccacttgagcccaggagttcaagaccagcctgggcaacatagcaagatctcatctctacaaaaaaaaaaaaaaaaaaaaattagccgggcatggtggcacatgccattagtgtcagttatttagaaggccgagacggggggatcatttgatcccgggaagtgaaggtgctgtgagctgcgatcctgccattgcatccagcctgggcaacagaacaagaccctgtctcaaaattaaaagagagagagaaacaaacatggcagctcagaaacctggctgggggtgattgtggggaactgctgctgacgggctcttgggcacacccctcactccagccattctgcctggatgccttaggaacactcctcataccctcctaagagtcccatccaggccgccatggctcacttatccctgccacgtggactccagaaaacattctcagtagaaacccacagaaactgttcccagtcacaaagcacgccaggtgcatcctgttctttctgtcatttaaaaaaatgaatgtgtctctatccctccttcttataaaacagtaccctctcaccctgcatggcttaaattctggtctatcttacgcctttggattcaatgaccttcatcaaatgtctgcaaggcaagggccatttacagtaaacatggtgggaacttagcaatgtacttgggaaataaattctggtcaccaaatagagaagcaaatgcaacaaataatcccacagaccattataaaatgtcttttagacgatagttgtcaagaattagagttactcgtccaaaactgttgttggtgtttggaagcatccaaacatcggctggcccatgtcccataggggcgtctgcttagcaccctggtgagtggagagttgtgtgtatggggacttagcagagtgggaagcagcttgcaggaaggttgccaacgcttattaatatttaccaaaaagatgcaggaccggctgcggtggctcacgacagtcctcccagcacttagggaggccgaggtgggtggatcacctgaggtcaggggtccaagaccagcctgggtaaaatgtagaaactccatctctcctaaaaatacaaaaattagccgggcatggtggtgcacacctgtagcccagctactcgggaggctgaggcaggagaatcgcttgaacccaggaggcggagattgcatgagatgagatcgcgccactgcactccagcctgggcaacaaagagcaaaactccatccaaaaaaaaaaaagagagagagatgcaggaccatctgcctatgttccattttggtgatgatatctgaccttctgggagagagaacatcttaccccacagacccaggaaggcatgcacatgaggatggcaggagagtggctgtggacacttcctgtgtcaccatcctctgctctaggtgtgtactggtcacaggcacaggacagaaggctccccagagtccgatcccgtctcttgagctcagctggctatcctggaaccccccaacccgctgacctttggaagtggacagcagcccacgcctgcaggtggtccggccctgctgtgcagccctgttacagcacgttgtgtttttctggcttgtctctgccaagccccatgtgaccatggagggggccccgagcagacctgggggtggcggtactgaggcagaggcaggcgcacagtggtttccaagggagaaaatgaattcatgatctaaaatgcaaaaccttaattatgcctgactcctttcctccctccctccctcatttctctccctccctccctccctccctccatccatccttccctcgtttccttccctccgtctttttccttccctcccttacttccttcctctcttcctcctacccttcattgacctttcattttgtgactttgtcaaatacagccccaggctatcttctctttctcctctgctccaggttgttttctcttgctcctctgccgcatacatacccttccaccctgcgtctgcccatggaaatctcgtgtcccctccagtattcctgcccacagtggcctttgttaggaaattccggcacagtctcctcacagggcagcccttctgggaatcgctcccctgcgctcgtgtgcactcccctgcgctcgtgtgcactccggcccagccttcagagctgcttacctggctcttgtcttgtgtcctctgaccgcccatcagggcctgcccatggggctctgtctgcaggggagcagccccaaacacagtccttgtcagcacgccgatctggacctgaattgggcccttgcacacactagctgtggaccgaagacaaatcaggttctccccgtccccagagtggggaaagcggtagtgtgggcctccctggggtgcccatgatggtgtaatgagtgcgtgcacggagcctgctccacgtctctatggacatttccataacttttcttttggtttgtttttttgtttgtttgtttgtttgttttgttttctctgagacggagcctcactctgtcacccaggttggagcgcagtggtgcaatctgggctcactgcaacctccgcctcttgggttcaagagattctcctgccccagcctcccgaatagctgggattacaggtgcccaccaccacgcctggctactttttgtatttttagtacaaacggggtttcaccaggttggtcaggctggtctcaaacttctgaactcaaatgatcctcccgcctcagcctcccaaagtgctgggattataggcatgagccaccaggcccagctaacttttcaatttataaacactaatacctacttgtgtcccgtggcctcatctcagccatgtgaggccgatgttgtgcccattgtacagatggcagagcgcagctgtgtgtgcagtgcggattgcaggactgtgcctgagtctgggacagggtctttgccacagctcttgggatcctctcttctcatcaatgttatctcagagagctttcactgttggataagaggttgaccctggaccccaccccagtgctgctgggccctgtgggcactcacagagcagtccttgctggcctgactcatattcctgagtctcaggggttcctgtgccaccagagaacgaactccccaactgtcagtcactcagctcagtgcctgtatcttaaattgggcacctttagcaaaagtgcagtgtggaactgtgtatcctgctgccccagcccaggacctagcacagagccgggtactgtgccataataagccttggtaaaggctgctgtaggcttcacagtacagatggcagggctgtgcccgggctgcaggctcccatttaccagatgtgtgcagtgtggattgcagggctgtgcccggctgcaggaacacatttactggatgtgtgcagcacggattgtagggctgtgcgtgggctgcaggcacacatttactgggtgtgcacagtgcggattgcaggactgtgtctgagctgtaggtgcacatttaccgagtgtgcacagtgtggatttcaagacttagagatgagacagccagttcctgtcctgcccaagggtcgggcagggatacgcatcaaagaccctgggcatctttcccagcccgggcggtgcccccagccatcgcttctcagcaggacagccggcagggcatctgtcgtcttcgtccaccagcatcacgacctgtttgggggagaagtagtatttccacaccccactcagggcgatagcgtttgaggaagaagagaaagagagacttttggctttcctgatttcaatctttctgaaggtggacccatcactggtgaaaaaaattggtttttttggaaccaagaaagcagcctcggcctccagtgcctgaccaggctctggccagggtataggatcctggcgaggatgctgtgctgtgttgggcaggaagccacttcctccctctaaacgtcagtgtccagctctctcttcgtcgctttcttaagttgagggagctgctatgccaagggcaagcaagaaacaggcccctgagcccccaggttcacggctgggctttgaagcaggagtttcctcttcgccctcgggccacacctctgtagggtgcctctgcagcatttccctcctcgggcaggagcctagcttgcagaggacagacaggcaggaatgctggcctccatcgtgccaccagatcctgtccccaggcaagcaggaggggaggggaggcagtctcatcactgcagcaggaggggccacctctggagtccgcatggctgtggctgggctgtgcttctagaagcagcagctgtcgcctccactctctagggatttttatctttcctttacaaacttttttttacctttttttttttttttttttttttaagatggggtcttgcttgttgcccaggctggtctcaaattcctggactcatgtgatcctcctgcctcagcctcccaaagtgatgggattacaggcatgagccaccgcgcctggccgatttttatctttcctaccagccttttcatatgagctgagcctgcaggctgtgcctaagcatagccctttgaacttgattgaccatgagctttgaaaggctgctttgcagtctcagttctctggcaaatacaccagctcggttaagacgacttttctttgattgatgtcggctacatctagaaagcaggattgccaccactcctcgaagcaccccacgattagagtgtctgagcgctgcttctgctctgctgaggctggtgacaaattgcctggaaagacctcctgacagaggatgacgggctcgtctgcagcagggccgcttgcagcccaattgcttccaagattaaacctttccaaggcagtctgcactgccccatacacagttgggctgcttggtttaagattatggatgaatgtactgaattggatctcatttaaaaatatataggttttgaagtttgagggctcaggaagaaaatgaaatcctttgtcccaaaccagggcctggttttatcagtggcatgcgtgcgtgtgtgtgtgcgtgtgtgtgtgcatgtgtgttctaaagagaccctagtggcaaggcacagtggcttatgcctgtaatcccagcactctgggacgccaaggcaggaggatcacctgaggtcaggagctcaagaccagcctggccaacatggcgaaaccccgtctctataaaagtacaaaaattagctaggcgtggtagcaggcaactgtaatcccagttactcagaaggctgaggcaggagaatcccttgaatccgggcggcggaggttgtagtgagccaagatcgcaccattgcactccagcctgggtgacaagagcaaaactctatctcaaaaaaaaaaagagagagagagagagaccctagtttagctcttttggaaagcagctgccctgcattgagacacatgtgtcttaagcttgcttctggacgctagcactaaaatagcaatcggactctggatgcctctcacaggcaacttgtccacaaaaccacttccaaatgttttcccaagtgcatgcgtctgacccaggcttctttctcatccgcctcttgtggaaggaagatcgcatcttgagttctaaagatttttaaacaatctcatacctgcagagcaatgtatatttcaagaccattgacattggaaaacattcttgtttaatcaatgactctggtcctgctttagatttctccaaaaatagccagatcccgtgggcacgttgaagctgcagcccattgtgcagaattgcttaatgtgtacctcacctggttttggccttcacacaactgttgctcccttagcaaggggttcatttggttgggttttatgtgcaggaatgctggtgggttgggtgagtattagtatttaagggaaggttttgtttttgttttgttttgtttgtaagagctagggtctcactttgtcacccaggctggagtgcagtggtgcgatcatagctcactgcaacctcaaactcttgggctcaggtgatcctcccacctcaccctccctgagtagatgggactatagggtgtgcatcaccatgccaggctaatactgtttatttgtatttttgtagaggtggggtatcgctttgttgcccaggctggtcttgaactcatgggcctcaagtaatcatcccaccttggcctcccaaagcattgggattacaggcatgagtcaccatgcctggccataggggaagatatttttaaacaagatttgcttttgactagtgtcctgcatttgttaaagaccctagattgctccaggtgttctaaaaataaccaagcccacctgcctgccttctagatatgggctggagggcctgccaggagcattcttggggattgccagtagccccagttagcccaggctgacttacacttcctccctctcttaaccaaaataatgttgaatttttgtgttccttgtcttttaactgaaaagctcctgtttgtttgtttgtttattttctgagacagagtcttgctctcttgcccaggctggagtgcagtggtacgatctcagctcactgcatcctccgcctcccaagttcaagccattatcctgcctcagcctcccgagtagctgggactgcaggtgccctccatcacaccaagctaatttttgtatatttagtagagacagggtttcaccatgttggccaggctggtctcgaactcctgacctcaggtgatccaccgcctcagcctcccaaaagtgctgggattacaggcgtgagccaccgcgcccggccccgtttggtgtttttaatgctgtattgccattatttgcacttattcttttgcaaaatttcagcacctggtggtcaggatgttcctcctggccatgcacatgcaggacacacaacaggttcttgataagcgtgtgctgagcaaaactcactccttccttctggacacattcatcacaggtgtgctcgaagcagcaagagcttgcccctgctcagaagtgcttagttgctaattagatgtttccgcaaaggtactgaaattggaggcatcagtgttcatcctttagctatagcgttggaaaaatgtgattgatttacaactgtgactaaaaaggtgtttagagaactgttctatgtaaaacaagacagtaagctgggcacggtggctcgtgcctgtaatcccagcactttgagaggctgagatgggtgagttgcttgagctcaggagttctagaccagccggggcaacataacgagacccccatctctataaaaatatatattttttaaaaagctgagtatggtggtgcatgcctgcagtcccagctactccagaggctgaggcaggaggatctcttcagcccaggaggtggaggttgcagtgagctgtgcttgcaccactgcactccagcctgggcctcagagtgagaccctgtctcagaaagaaaaaataaatatatatagtgtgtgtgtgtggttgcaacttttgcacatcaccttgagttctgggcaaggggagaggaactgagattggtcactcccttcttgcgtggatggctgtgggatttgggtgagttttttgctccatagtgcttttcaccctgtattttctcataggttttgccccactggggctttgtatagagattggggctctcaggtcccatatggcacttactagcgagagttccgagtggccagtcccctccctgccctggcattggtacaagggggccttgctgttggaccacagtcttccaagagtccagctcccctgttctatcgagtctgaagcaaggtcccacttgggagttacagatcaggctcctttgatgtcagagcatcgcagcggaattctaggccacccggcagtgagtgctctctgcagatctgtgagtggtgctgggccgccctgccacctccatccctagcaccgtatctgtgtgaaaaagctgtgacctgccccttgggtggaagccttccagtccttggaaggggaatctttgctgctgctactgtctgcagagagactctttttatttttatttatttattttttttgatggagtcttgctctgtcacccaggctggagtgcaatggcacaatctcggctcactgcaacctccacctcctgggttcaagcaattctcctgcctctgcctcctgagtagctgggactacaggtgcttgccaccacacccagctaatttttgtatttttagtagagacagggtttcgtgttggccaggctcgtctcaaactcctgacctcaggtgatctgcccgcctcggcctcccaaagtgctgggattacaggcgtgagccaccaagctcggcccagagggactctctagagaggccccttgatcccacaaggggcgggggtctctggccaggcacagcccctccccactaagcccagcacctggtgccgaacacacacacacacacacacacacacacacacacacacacgcccgccccccgctccactgttctgttgtcagttgtgttcgttgttttcttgtaaataaacagtatgacaataaagggaagttacttcttagctgctcagaaggtgaccagagcagggctggagtgccagccttgcattcattgtttgctttattgcaaggctgcttggaattgaaggggatctccgttcgagtctgagctggaggaaggaaggggctcctgtaccatgtatagaacttgggctctccccggggtcaggggcctgggctctggtgcagccccaccacttcatcaggtcaccccaggtggtttcagcctctgatttctcatccctggaatggggtgtttgcagcctcgtaggttgctatggggattgaatgagatatgttcatgagccagtaaggcagccaagatgtcacttacatggaacttacattgcaaccccagttttagaataacataggatattaaatatcaccatctccttgaatactcatagtccgcagtttgcttcatgttataaggtgtttagttctaggctgagcctgtaatcccgccactttgggagactaaggtgggaggattgcttgaggccaggggtttagaaccagcctgggcaacatagtgagacccctgtctctacaaactatatgtatacacgtataaattttataaagatgtttagttgttctgaatttcctaaaaaatacagcttaacttttttgtcttcctttacctgcacctggatgcagtgggaaagattttcccagtagcacaaggtggaccaggtgagctatcctcacccaatggggctgaaagacagggctttgatatcctgccccagagcccggctgttaccacatggtttgatttgcgatgccaagcaggcttccttacgggtccacacacctctggtttttagcttgagattggggcagctgttcctcctctggcccagccaggtataatcaggtacaaaggaaagtgacctagaatgaagaggttgccctgacctggtggtggaattggagcctgggagcacgggtcggatggcttagttcatctgtttggcagtggatcaaatccccctcctcccacatacttgatttatgtggactgggaaagaatgttgggtttcaacataaagaaaacaaatttggctgataactcgtaaatcacaataaactttcattccaagagtgttctgggcttctaagaaatatattcctatctcacatctcagttgatattcacagccaccattgagctagagtcattcccaggtggagaaactgaggcttgggagttatgcctgccttggagagggatggggctaagacttgggctctggtgtcctgaccaccgagcctggttccttccacgtggtctgattcctgggatgtgaagcagccatcctcacagggccacacacctggacaggtacacagtgcagcaagtagagaggcaaagaaacaagggaattgatcaggggtccacacgctttctctaaaagagcctggtgctacatatgttagtcttgacggagaaagaggcaaaatcaggatatcatgtaggcacttatataaccactttaaatgcaaccatttaaaagtgtaaaaaccattcttagctcatgggccataaaaatcccagcagctggctggttttggccggcttgccgcagcttgctgacccctgggagagagcatctgctgctattgcaggcaggggactgcaggtcatccccctgtttgggtcccactcctgcccgtcattcaggctctgtcagcttctacccagaagtacctgggagtcgggggttttgctgtgtcacagagaacttggctctcgatagagtcggaaaggaattctgggaaaactctagagatgcattaaaaaatctccactgggccgggcgcggtggctcacgcctgtaatccctgaggcaggcacattacctgaggccaggagttcgagaccggcctggttttttgttttgttttgttttgttttgttgagacagggtcttgctccatcatccaggctggagtgcagtagcacgatcatagctccactgcagcctcgagctcctgggctcaagcgatgctcccacctcagcctcccaagtagctggaaccacaggtgtgcaccactgcacccgggttaatttttttatttttgcagagacgatagtctccctatctttcccaggctggtctcaaactcctgccctcaagtgatcctcctgcctcagcctcccacagggctggggttatagacgtgagccactgcacctggcctctttcttcttgaggctagttttcctgactgcgtgattcccaaagcttcaccccactgatgctgggttcccctcctctgtctactccacctgctgaggctggggctctcagggacacagtcagcagctcagcctctggaaagacctggaaagatcacatccttctgggaacctgcttctggaggcacaagtagtgtagctcctcttaggccctttcgatgaagtaagagcagctcattagcatcccaggctacaaagcctaaaaccctttgcttttaccaaaaccagagggtctaaagagaaaggtcacgaggagcgagcggccgcgtggatgaggttggccagagaaactggtttgttttggaagccgatggaagatgcgcttggaaggctaaggctgccgaggttgaagtccgtcattctcagtgcagaccctagggaggaagtagcaggaccccagtggggctgcaggcattcagaaagagagctgcctggggtttcccttcagaacctccctccttttaacccgggagtaaagagaaaaagacccgcggggtccactggctcggaagtcggtctctttcagtttggagcctccagttggaaacctgccttttaatggccaggctgatggtctagttactctttgaacagggaagcctcgtcaggctctctgctgaccacgcctcagtgctccctcgaaggacaactctggaatgccagtttttatctcatctcggtagaatggattttttttcttttcttttcttttctttctttgagacagagtctcgcgctatcacccacgctagagtgaaatggcacgatatcggctcactgcaacctccgcctcccgggttcaagcaattctcatgcctcagcctcccgagtaactgggattacaggagcgcgccaccacacctggctaatttttgtatttttagtagagatggagtttcactatgttggccaggctggtctcaggcgatccacccgcttcagcctcccaaagtgctgggattacaggcgtgagccaccgtgcccggccctagaatgaatttttcttttagggaaaataaggttattggtgaatgggtttgggctgtcatcttcagaaactgatttcatctagaacagtttgtgacgggcagatgtggaataaaaccactggatgcatcaggcgtcactgccaagggtgcaaggggctgctccatgctgggcgtgcgagaggagcaagaagccgtccccgcccaccacggtgcaggccgggatgcagcggaaagcccttgcttcttagatttcccacacaaaagtgtatttcttgtagatttcgccagcgcgggcctcctcctctgcttggcagtggctctgcacgagctgccttgggatggatctctcatctttgctgctggcctcatccaaggaacagaccccatgcacggagcctagatgccccgaggtcttcactgatggccctctgaatttttattttgtttgtatttcatttgttactgattgaatttttgagacagggtctcgctctgtagcgcaggctggagtgcaggggcgcgatcctggctcactgcagcctcggcctcctgtacctaagccatggccctctctgactttgaacccctcagttcattctcagatcagaccactcactcactgaggccctcggctcttccacaggtctcagccttttgccccttatagtttttagttgttgcagcctttctgttctcttcccctctcctgttaaggggacatttccaagcaccctggccacagaacctcctcacctcccaccctccgcccctgggtgccagggcctgggttctctgtggaagtcctgccagctccgggtatttcccacgtggatttctcatcatcttcaccaccagatcagttcctggcctgcacccctcctgtctggcttgtggcaggggctgccaccctcacctgggccctaaacttctacaaagccccactctctcctgttcccgtcagtctgcttgccaagtccagtttattttaattctggggaacgttgtcttcctcctcccccctccctcgccaccacccacctctggtgttttttttgttttgttttgttttgttttttttgagatagagtctcactcttgtcacccaggctggagtgcagtggtgcgatctcggctcactgcaacctccgcctcctgggttcaagcgattctactgtctcagcctcctgagtagctgggactacaggcacccgccaccacacccggctaatttttgtatttttagtagaggcaaggtttcaccatgttggtcaggctggtctcgaactcctgacctcaggtgatctacctgccttggcctcccaaagtgctgggattacaggcaccacttctggttctgttaccttcgtccaaacttgtatttcccagctggtatcttccatctccaggctttcccctctggcctgtcctttagcaggagtcaccttcctgaagcagaccctggtctggtctctgcgtactaccttttgcatggttggtggccgtccacccgcctctcaggccatgtctgggttcttctaggggcttcggtgatctgggagcctgtccccgctggccccctctcccatgtcttactccatcagcttcaccttgtttgtatctctggatctcctcttttttccttctgtttgtatcttgtctctttctagaaagcccccccacctctactcgcccctctgtggcaaatatcacccaattcaggtgcccccagcccagcaaagagggattttcattccttgggcccccgttgtaggctagctgcgcctgtctttcggcacatttcatttcctgcctggtatttcggtcgtgtgcgtgtctttattctcctcgtgtaatccctgaggtgcagagtgcgtgtctgtcctcctctgccctctctagagattgggatatgaccagtgttcagcccccaaccaaaagagcctaagaaccccaggtccccagcctgtcctgctctgctgggggcccacatgcctggggacaaggcacctttccttccctgaccttgactaggacaggacatggggtagggcctgaacattgagcaattgtcaaactgcctacttacgatgaacaaaatagcttttcaggaggcgagaccacagcacagtcatggtgaatcctgatgcgcaccccaggtcttttatcaggatttttgtttttcctggtgggcacagatgtaggtggagcagatcagaggcctctcaggttcttgatcactcatggcagttcaggcctgccagtagtgaggtcagagatccatacagcaggggagagaagggaggtacagggaaccctcggccccgcgtgctccagcaggtctgcatgattaacctgaattgcagtgttcagaggctcggcctgccagccacagcggttccagatgaaatgcagcttagaaggcagcatggtgtagtagctttggcgccagccgcacccagagtttggattgtagccagatggcctcaggtgcaatgtataacctctgggaattccagatttcctatttacacgacagggatgattccatacctgaagggctgtttggaagcatctagaagcaagcacagtggagtggctgtcatgacgctgaccgcacaaatgatggtgttaggatccctccacggatgtggccaggtgacacccctcacctaggccgcacagcaccctaatgtacacactgaagaaaggctgcgtggggctgcagagcggctcatttctaagaaggccaaagaaattgctcagtccagaccagggaacccagtttctcttttagaggtgggatcttgctatgttgctcaggctggtctcgaactcctgacctcaagtgatcctcccgccttggcctcccaaagtgttgagattccaggcatgaaccactgcacccaacctgtagcctctttctacaagtaaaataattcaggtgagttcaggcccacgccaggtcttaaaccctggccctctgcccatcttccagcctccaccccttctctctccttacagaatcttctgttcttctgcacaccagcgtggcagacaggttggccaagggccttggacttctttatctctagtacatgttcctgtaaatttaaacctcctcagttgggtaaaagctttggaattactaacattccttttgtgctgcctaacgttcttgccatttaaaagattagcaggcataatttcagtgagccttcgtgactggcgtgcctcacttagcttaatccctggttggtacatgttaaaacctataaagacagcctctccagcacacatggggagcttgaaaatgaaagaaaggttgctctgacctctcagaactgcggacttcttaaaaaagaaagagtgaggtgggcggcctcccttgctgccggtgctagattccatgatatgaaacagcaagggtgcagctgggtgcggtggctcatgcctgtaatcccagcacttcggaggcgggggtgggcagatcacctgaggtcaggagttcgagaccagcctggccaacatggtgaaaccccgtctctactaaataatacaaaaattagccaggcatggtggtgagtgcctgtagccccagctactcaggaggctgaagcaggagaatcacttgaacccagaggtggaggttgcagtgagctgagatcacgccactgtactccagcctgggcaacagaacaagaagactctgtctcaaaaaaaaaaaaaaaaaaaaactgacttggatatgtgcttacataagaaagggagattcaccaagtgaaccatgcatagcatctcttaaatctgtatcatggaattcgtgattgggcctctctttcatatcaggcaacatacatgtgatgtacatacctgtagcttccgggaaagggaaggaagtagagatgacattgtctgttactcgtttgtatgtgtgtgtgcgtatttaagtaaatatgtgtgtgcatagggacatgtcacatgcatgtgtggcacatttataggatgaagaggtgtctaaaagacattgaggaaactcagtgaaggagttctgccggcgggcgtgaggaccacgctaaaagatgccggttgtgctttgtgtctaagctgaaagcatggatatcattttataaaagtaaaattatattggccaggcgtggtggctcatgcctgtagtcccagcacattgggaggccgaggtgggcggatcacctgaggtcgagagtgtgagaccagcctgaccaacatggagaaacccccatctctactaaaaatacaaaaaattagccaggcatggtggcacatgcctgtaatcccagctactcaggaggctgaagcaggagaatcacttgaacctgggaggcggaggttgcagtgagccaagatcatgccattgcactccagcctgggcaacaagagcaaaactccatctcagaaaaataaaaaaaaaaagtaaaattatattgttattgacggtctctttgttcgagtaagccgtctctggatatatcattgtatggtgtattcatgccaaggatttggtgtgagtcttgaagcattcacaccaaattgtggccaagcccagcactgagagcgcagtgggcgttcggaggacacgtttggattttgtgatcctctgcctggcaggagctgctcagcccctacagccccttccccgagaccaccaatgcgtttctcttcagttttgctattctcatacgctggtgatgggattttggagacaaacatggtctcttctgcttgcttgcttgcttatttatttatttttcctcccaggttcaagtgattctcctgcctcagcctcccaagtagctgggattacaggtgtgcgccaccatgcccagctaattttgtgtttttagtagagacgggtttcaccgtgttggccaggctggtcttgaactcctgacctcaggtgacctgcccaccttggcctcccaaagtgctgagattacagacatgagccaccgcgcctggccttctgccttttttggtgaactccctgtgggtgggagaactacccggtggagtcggtacctaaccagggcaggacacggaggtacacccctctcattttcggcagcagggtgagaggatttttattatcttacttagacacttgaatttatttttttattttgagacggaatttcggtcttgtcacccaggctggagtgcaatggtgtgatcgctggtccctgggttcaagtgattctccaacctcagcctcccaagtagctaggattacaggcgcccatcaccacacctggctaatttttgtatttttagtagagacggggtttcaccatgttggccatgctggttgacgcttgaatttatttatttatttcagataattttggactacagaaaggactctttgaaagggtattctaaaataatttcacccaattaggttttaaacatagtctgccatattgttgatttcacaggatttgcttttttaaaaaaatgtattttatttatttagaatttttctttaagagatggggtctcactctgttgcccaggctggagtacagtggtgcgatctcggctcactgcaacctccgcctcccgggttgaagcaattctcatgtctcagcctcccaagtagctgggactataggtgcgtgccaccatgcctggctaatttttgtatttttagtagaaacggggtttcaccatgtaggccaggctggtctcgaactcatgacctcaagtcatgcacctggcttggcctcccaaagtgctaggattataagcgtgagccactgtgcctggccttcagtagcttttaaaggttgtagctgaagattttgtacttgtcacatgggggaatatgataatgaaagcagaagatagactagtcactctacttttcccagcgtcctctctgactggactctttgaaggtactgcccagggtcatgaagagatggccctggctgcttccagaaggtatacattcccgtgtccactctgtgtcctggagagtgggggcggggggagggggttgtccgtctttgtatctctgtctctcagtacaaatttaatgaaggaatgaatcaatgaatgaatgaagcaagcattcccccagagaattcttaaatcatcttagccggtcatggaatttcccagcaagtcagcttttagaatcctgaaaatattttcagtattcatctctttaaggaatatatcaaaagcagtcagcaccaaccacggtttttcagctgattcccaaatgtgtgataagaaacacctaattccttgggggagaaaacttgttcaggttaaattcttgcggtaatccttacggccctgtggtgttcgctaagatgtagcaagaatgtaaatagctaggtactttgatctacctcaaatacttactagtttaaacattctgccattctgccgtcataccaaaaaaaaaaaaaaagcaccatcccagggttatgaatgacgttactgtctttggacatgctgtcttgtgtggctgagacgtagatcaagagaaatttgtaagaaagacaataaggtacaaaaatcgccgaagctaatgtcaagatggagataaatagatctatatttgccatatatggtagtaaaagaaaagtctgtgcaaatttgctcgacatttatggacttctatgattcatctaccagggccagcagctccagccaagagatatagaatgtcttcaactgtatttctttcctaaattgtttcattacaaagaagccatgttgtgtattcagaagaaaattccaggaccgcatgaaagtcactatttgggaacaggcctgagaaagcttgcttagaggaattccaaaagtattcaaaaggcagttattgaccaaacacataataattctctaagcatcaacaattttccatagatccaagctcacatatacagcgtattttctgtggctagtcactccagaaatagagggttctctgctttcttgactgattgactcatatgcaaacgcttctcatttcattttgttatttttttgagaaagggcttgttctgtctcccaggctggagtgcagtggcacagtcacggctcactgcaccctcgacctctctgggctaagccatccttccacctcagcctcccgagtagctgggaccataggcacacaccaccatgcctcgctaatttttgtattttttgtagagacagggtctcgccatgttgcccaagctggtctcgaactcctgggctcaagcaatcctcccacctcagcctcccaaagtgctgggattataggcatgcatcaacatgcccagcctgttttttgttttaatctgttattgagtaaggtgcaatttgtggctccatatacagggacaggttgcaaaacaggtactgagccgtgtgtatccttcaggtccaagcagcttctaaactgtgtctatctctgttcaggtccctggaactctcctgggcagcaagctcacaagagaccgacctctgtggccttcgaagcgggttgctgttagacacaccttttagaagctacattcatagtatctcaaaagacagacataaggggtactcggtatggccaccactcactcccacaacacagccaccatttcccacccagaatttcctgtgaaatgtgctcattttaaaacagcacacatcctgagaattgcaaagttgggcatagagatcaatacaaattagacttctttttagatacgctctacgctctgcagagccctctggggtctccaagggctgggacctgctggataaaactggatgaaactaagttgctgcttctttggtgcccttgaatggactttcttggctgcagtgacgttaggtccgcttcctagccgcgtgctgctctgccatcggggatgctaaagtcggggagggccaggaagcctttctttgcttggaagtttttgtttctccttcgcctgctaggttgggataatccgttgggaagtctctgagcgtctttaaacataaaatctagtttcaaaggtttaaattcccaagttgccccctaagttacatgttgcttaggcttggttgctatctgtatggtataaataattccatttagaaattaagaaattatgggctgcatttttgatgccagtggctctgtagtatcccccaaccaccaaaaaaaaaaaaaaaagaaaaaaagcatctaaaaattgtgaggttaccgcttagctctgtctttctggctgcacatgggttaccaggtgccttgccaagaccctgcctccgtgtccaccatgctttgtgtctgcaagtagatttacccatcgttcattattaattattcctctgagcagctctgtgaagctagtaaatattaataaacaatatgtgctgattatgaacctaagacaaaaggatgtctttttcaagctgcttaattttaggtaaactagttgcacacaagcgatgaataaacgtgaagtcaggcatccaggcggtgaaacaaaatcaaactggaactgcaaaaggagagtgcctgagatctgattttattttatttttgggatggagtctcactctgtcacccaggctggagtgcagtggcgtgatctcggctcactgcaacctccgcctcccaggttcacgcaattctcctgcctcagcctcccaagtagcttggactacaggcacacaccaccatgcccagctaatttttgtattttaagtagagacggggtttcactgtgttggccaggctggtctcgaactcctgacctcaggtgatctacccacttcagcctcccaaattgctggggttacaggtgtgagccaccgcatccagccgaaaggatacagtttatttaaagacaaaggaaaaagaaaaaccataattgtgttcacttagaaacatctcccatttcatactgatgtctttcctggtggtggtgtccaaatgcttatatgtgtgtgagattcattgttaccatgttgggatcagactgtaaacaagctttataaaagttcgtggctcctttcactcatccacccgctatgcatcgtccagatctgagttcacgtgctccttccccaaaggagccttctctcctgtctagggtcaggtctgcctctttttttctttttctttttttggaagcagggtctcaccctgtcaccaggctggagtgtggtggcgcgatcacgactcactgcagccatgacctcctaggctcaagcagtcctcccacctcactcccaagtagctgggattacaggcacatgccactacacgtggctactttttaaaatttttttgtagagatgggatcttgctctgttgcccggggtggtctcgacctcctaggctcaagcgatcctcccttagcctcccaagtagctgggacgacaggctcatgccaccacacccagctaatttttttgatttttagtagagatggggtctggttatgttgcccaggctggtgttgagctccagagctaaagcagtcctctcgccttaacctcccaaagtgctgggattacaggcacatgcccctgtgcccggccaggcttgcctcttaaactcccttcgctccacatgcccttctgcagcaccggccacagataagtgtcatccatgctggtggtgatttgactcatgtctcacctgccacacaacagaggcccaggaggcacagcagcctgtggtctctgctcatgattgaaggagcccctaaaacagggccggaaggcccaaaatagccactcaacaaacatctgtcgcataaatggaagtcacgtgcctcattccaagtctttgctgttcttcaaaaaataatggtactccaaaaaataatgatactccagattacactgagccatgaccacacccctgcactccagcctggacgacagagcgagacctcgttccttacaaagaattatactgagtacctaatatgcaattgcattgctttagtagaattctctcataagtactcccctggtgtcggaatccacattgttcccagttgttctctgttctaaactcatgctgaacattcttgtgcataaatctctgcctacatctctgattattcttacggatagactcctgaaagtactaagaggaaggattaatctgcgttctgattttaaacagcccatttgtctaaatattagcagggcctaagatctggaataaatgacacagtggcaaaagtcggagtcacacgtcctggttggtttcagagagtcctggggtgaaatggtgcctttggggtccatccctgtctagcacaggagtcccctttgcagcagtgtccataaaacgttagcttgggctgggtgtggtggctcatgcctgtaatcccatcactttgggaggccgaggtgggtagatcacctgaggtcaggagtttgagaccagcctggccaacacggtgaaaccttgtctctactaaaaatgcaaaaattagcctgacgtggtagtgggcgcctatactcccagctactcaggagaattgcttgaacctgggaggcggaggttgcagtgagccaagatcgcaccactgcactccggcctgggggacacagagagactccatctcaaaaaaaaaaaaaaaagtgagcttggtgatgagtctgggaagagcatctcttcattcattcagtccacaagtattcactgtgtctgccccgaacctagcaccatcctttggcccaggaatagaacggaggaatgtacatctcctcaaatgtctcctagaaattgagacctcaccattctcgctaagctccctgagggcagggactgtgactgtctcattcactgctcgtagttaatgctcaaatggtttttgaataaattaaaatacaatatgtgggccagtgcggtggctcacgcctgtaacccagcgcttcggtaggccgagatgggtggatcacctgaggtcaggagtttcagatcagcctggccaacatggagaaaccccatctctactaaaaaatacaaaaattagccaggtatggtgacacacacctgtaatcccagctactcaggtggctgaggcatgagaatcgcttgagcctgggaggcggaggttgcagtaagccaagatcacaccactgcactccagcctgggcaacagagcgagactctgtctcagaaaaacatgtggttcctctctttgacaagttccaaatctattgatgtaattgatgtatagatacatcagtaaatcacagatgtattttcaaagttctgaaatgtaactagagatttgtttatttttgagatgaagtcttgctctgtcacccaggctggagtgcagtggcatgattatagctcactgtagcctcaacctcctgggctcaagtgatcctcccacctcacccttccgagtagctcgcactataggcacttgccaccatgcctgggtaatttttttagaaactttttgtagagcaggagtgtccctatcttgcctagactggtcttgaactcctggcctcaagcaatcctcctgtctgggcctcccaacgtgcagggattacaggtgtgagccactgtgcccagtcagaggtttcgacatgagcagttattcagaaagggacctggaagaatattttgaaatcagacctagagtcaaatcagacttatttaagagaattaaccaatggagcctgaatttggcttctcccatttcctaccactgatcccctggccatgaggacagtcctgcaggaaattcctgtgccaggtgggctagcccaggacacatggctttggagactaggcagggaagatccagcccagggtactggagctggcgcttgcatgcccctctcactggggtgtctgatccccagatgccaacgaggctctggctgtcctgtctgagctgcccctgaggccacacacaggatctcagagtggacaaacagcctttcccttgacaatgagcagttctcagctctgagaccagaagaagccttagtgcaaccatttctcaaagtttcagtctcttaaaattgaggactccggagagcttgagtgcgtgcgtgcgtgcgtgcgctgtatctctcagtattgactgtgttagacatgaaagctgaggagtctgcaaagcacaggaacacacaaacacacgagccgctggtgtcagagtgaggctatcatcacacatcgcaggcatctggaaaactccactgtacacttgcgggagaaggcgaggaaaaggcaagtaacaagaatagttttgaccttgtggatccatgaaaggatctggggagccgggagtccccagaccctgctttgaggatcgttggcttagtggcattggcatccaggctccaccataatcctgagccgtggccacgtgctgccagatcacggcctctgtgcagttcgaatctgcccttcttcttagtcctttgcaccatcctcagcctttatcctcctcggtccacattcaggcattgccacttagataaccgcccccgcgcccccctcccaccccacttttcaacatcagacaagtctttttttgtttgtttgttttttgagacatagtctcattctgttgcccaggctggagtgcagtggcacaatctcggctcactgcagcctctgcctcccgggttcaagcaattctgcctcggcctttggagtagctgggattaaaggcacatgccaccacgcctggctaatttttctatttttagtagagttggggtttcaccatgttggcgaggctggtcttgaactcctgccctcatgtgatccacctgccttggcctcccaaagtgctgggattacaggtatgagccaccatgcccggtctcatcatcagacaagtcttgcagatcccctcttgatcaggaactcaggggtccccacctgcagcttcagggtacccctcgctgcttaccagcaggcaccctatgttgaaatcctgcaccctcatctcagttcccaatcccaccagtcccccaaagccagcccttcccgtggtggagttgtaccacgtaccacgcaaaagccacagcatcagcattggagactctgccaggacacggaacgtgttttaaatggcacaaagacatttaaatgggaagaaattatagcaggagtgagtttatccctttcaagataatcttatttaataaccaaaaaactcacaaagatgtgcattttatccgactacaaaagcagcgtggcgggttatatattgtggtaattacatgtttggggtttcattcctcctttaaaccagatttcttttatttcagaaaatcagccattgtagaaaaagactattcatttatttcattgctgggtggcctatacactgtaaaaataggtcaagaacagtaatctaaattgactgctgataaataattaaagctaatggaatttttctcaaacctgtgaactaaaatctttgagaaattgccaggacatacttactgtctgctgttgtatagaaagatattttttatttaatacttgagtttcaatgccatttaaaattacccttttctatcacaaggactggaaggaatatgtgttcatctataaaagtaaccaaaggaacgatgccgtgttgatggttatatggttcatcttcagatgagatgggaagtgacggtttcagtatcctggaacaaaagaaacatcatttttcactgaactggattttaagttgaggtctacagtccacatatcatataatatatattgtcttgtttttaaagactccatacctggtctgagctcttgtatacattgataagggaaacttaacagctatctaacgtgacatccaggaaaataaatactaagaacattttttctttcattagtaattactgttctctcattgctgctaccaggaccttataaaaagacattggggtcaggcgtggtggctcacgcctgtaatcccaacactttaggaggccaaggcaggtggatcccttgaggtcaggagttcaagaccagcctggccaacatggtgaaaccccgtctctactaaaaatacaaaaattagctgggcatggtggcgggcgcctgtaatcccagctacttgggaagctgaggcaggagaattgcttgaacccaggaggcagaggttgcagtgagctgagatcgcgccactgcactccagcctgggtgacaagagcaaaactcggtttggaaaaaaaaaaaaaaaagaaattacaaagtgagctaagaccagaggagaggggagaggcaagagcggagaattaccccagatgagggagatctggaacagaaggtgacaacaggccaagccacagggccaggtccctaagggtccccacctctagcaccattggcaacaaccttgtgagagtcagaatcaagtctttcagaagtgacccagttcagcccctcactacccccaccctgccctagtgctcttggaaagactacattgtctccgaaggagaaagggtcccacccctgaactgtcactgtacaggatggggtaccaccaagagatgttgtacctcttaaatgcagtcagggttatttcccagaaaagtatccaagttactgtaggatgaaaaagacatccagaaaaacctggattatcagatttttttttcccccatttggagacagggtcttgctctgtcacccaggctggattacagtggcacagtcatagctcactgccatcccaaactcctaggctcaagccatcctccacctcagcctccaaaatagataggactacaagcctgcaccaccatactcactaatttttgtatttttttctagagacgggatttcaccacgttgcccaagctggtcccgaatgcctgggctcaagcaatcctcctgccttggcctcccaaagtgctgggattacagttgtgagctaccagatacttttttttctcttttttttttttttttttttttggatggagtttcctgggttgaagcgattctcctgcctcagccttctgagtagctgggattataggcatgcaccaccatgcccacctaatttcgtattttttgttagtagagatggggtttctccatgttggtcagactggtctccaactcctgacctcaggtgatctgcccgcttcagcctctcgaagtgctgggaatacaggtgtgagccaccacacccggcccagatattttaaaaacagaaatgacttgatgactttggagatgtgtttgtaattcacagcctccttctatgtgtgcattgtgtttgtgctgattccagtgagcctctcgctcctgcagacagaggtgaacctccatgcagcagctcagcgtgtcaccagctctgggtccctggcacgcgactctgggatatggggagtggaagagagctcatgggaattgggagcacgaggccctaagatggagcagagccttccagagagggctcgggagtgtgtgtgttacgactcccgctcgtacgttacaggtgcaattgaacactgcatgacgattttgtctctattttgcttttacatcagaatggtttcctccagcaattggcattacctagaaaattccttaatagcattttgctgttcagttctctgacctaaaaactgagttgtgaatcagcagtttcgagaataatggaaatacggccagacacagtagcacacgcctgtaatcccagcactctgggaggctgatgtgggtggatcacttgagcctaggagtttgaaatcagcctgggcaacatggcgaaaccccgtctctacaaaaaatgcaaaaatttgccggacatggtggcgcatgcctctagttccagctgctcggggtgctgagatgggaggattgctcgtgcccgggaggtcacgactgcagtgagctatgattgagccactgcactccagcctggaagagcgagacactgtctcaaaaaaaaaaaaaaagaaaagaaaaagaaaagaatggaaatccttccacatagaaacctctctgtgtaaacatcatttatttgctgtgtactcaaaggagaggaggttgacatgagctattttggcttttgccaaaaggcatatgattggaattatctcaagaacatcactttctgtgcattaagatgtttgttgctttttgcccaatagatgggatgggatggaaacaaggtgaaaacatcactgacaaacctgaattaagtatataactgaattaagtgtgtaacgtgtaacttgaagtaattaagttttaaaacatggccgggtgcagtggctcaagcctgtaatcccagcactttgggaggccgaggtgggcagattacttgaggtcaggagttcgagaccagcctggccaacatggtgaaaacttgtctctactaaaagtacaaaaattagcagggcggggtggctcgcacctatagtctcagctacttgggaggctgaagcaggagaatcgcttgaacctggggggtggaggttgcagtgagccgaggtcacgtcactgcactccagcctgggtgacagagcgagactccatccccctccccgcaaaaaagtttttaaacgtgttcactgcctccttatcatttgttccactgtggttttggccagcctgaaccccactttttccagtttatgaccacaaagaaggattgtgcgggtgtgcatgaggaccagtaagtggcagagtctgcattttctggtgctgtccagacagcaaagagtgctgtgttctagaaagacagtaaatcgtatcatgtccttgctaaccgacgatggagaattctgtgggtcagaattgagcatcttttttgagacagagtctctctctgttacccaggctggagtgtaatggcatgatcttggctcacttgcagcctcaaccacccgggttgaggtggggagcctcccaatgtgctgggactataggcgtgagccgccgtgcctggccagaattgaacatctttgtatctttcttcttagtttagtacaaaactgaataatatttgcaggcagcagaattggatcgggaatttctcaaactgccaaagatgaaattagaatgagtgatttttggctggcagcttgaagtacatatatatcagtttgtgtatgatacgtgtgagtatgtagtggtttttccctcttcaactgtctttaaatatgtgtgcgtgcgtgagtgtgtgtacaaacacacgtagctttaatatcaaaaaggttatttttgtaggtctgttaggagacatgaatatgctcaaaagggaaaaaaatacatggatagggtgagaggagtttgctttatttaaggacatgataaaaggcatagcccttctgcctttctggaatgctgtaacagaatatagaaataattgtatcatctcctgtacttctcagagctggtgtttgcgtgaggctggccctgtgccaggttggcagggttgggggtaacccaggagcatgcctgctaaggcacactgccattcagggcctggccttgcccctgcgccccagccccctgctctcctccatccagctctgccctcttccatttctctgctacagtctgaaatctctcagccacaccagctttctcattccatgacctcatctgacttgtctccttcccctctgaatctgagcccttgttaagcctttttttgttttttctttgagacagagtctcactctgtcacccaggctagagggcattggtgcagtctcagctcactgcagcctctgcctccgcggtttaagcgatcctcccacctcagcctcctgagtaacctggactacaggcatgcaccaccacgcccagcttatttttatattttgagtagagatggggtttcgtcatgctggccaggctggtctcaaactcctgacctcaggtgatccacttgcctcagcctcccaaagtgctgggattacaggtgtgagccagcgtgcccagccatagctattcttccattcattccctcatgcaccctttccatgtcttttgagtccccactgtgtgccaggccccatggtcgttttccctggaccctgctgggatcatagtaatcttcccccatcattctttacgccttccacactcttttcccttgttaccctttgtgttatatgttgtcctctacctttctgaaaagcacagtgggtgaaatgcggtgatgtgttagcttcctgttgctgctgtcgcaacctgccatgcgccgagtggcttaaaacaacagaaatttatcatgtgacagtgctcgagttcaggagtccaaagtgggatggattccccaggctggaatcaaggtgtcagccagagttgtgttcctattagaagctctgggggagaatcagtttcctggcagtttccagcctctcgcgctgccggcattcctatagcattccgacctctgcgtcggtcctcagatctcctctgactctgagcctcctgcctgtctcttactaggagcactgggattacactgggcccacctggataatccagggtcatctcctgactcatgatccctgacataatcccatctgcaaaagccccttttaccattgcaatctaacacattcacaggcgccagctatgaggacgtggttatctctggcggactattattggtgctgaccacagatagccttatttatataaaaagagattggtggccaggcatggtggctcacgcctgtaatccacagcacttcaggagaccaaggcaggcatatcgcttgaacctgggagttcaagaccagcctgggcaacatagtgaaatcctgtctctacgaaaaatacaaaaactagccgggtgtggtggcgcatgcctgtggtcccagctacatgggaagttgaggtgagaggatcccttgaacccgggaggtggaggttacagtgagccgagatcatgccactgtactccagcctgggtgacagagccagaccccgtcttaggtgggaaaaaaaaaagattggtaaagaatctgattattttttgtcctggagcctggtgtaaaaaaatagaaaatcatctagttgaggaagtaacaggattgacttctccaaggaaataatggtatcacgtttagaaatgcatcctttggaacagtatatagttaaaagggaaattataatgcttcttgaccaaatgtttctacaggatcacaatacaaaataacgtgggctgtgatgatatttgtcaaaaaacttgtggtacagtggccaggtgcagtggttcacacctgtaatcctagcactgtgggagatcaagacaggcagatcgcttgagtccaggaattcaagaccagcctgggcaacatagcaagacccttatctctacaaaaaaataagaaaattagcaaggcatgatggtgtgcgcctgtagtcccagctacttgggaggctgaggtgggaggatcgcttgaacccaggaagttgaggctgcagtgagctatgatcacaccactacactctaacctggatgacagagcaagaccctgtctcaaaaaaacaaaagcttgctgtacaggcctgtcctgtaggtccctctgcaatgatggaaaaattctgtgtctgcattgttggaagcagtagccaccagcaacgggtggctaccgaatccttgaactgtggctagggtaactaagaaactgaattttccaaatttatttaactttaagttatatttaaatataaataagcacatatggctgtatgtgttgaataagaagactttttcatctgggatcttgataggtcttacttaggaagcctctgataaaataatttgcagagttttatttctaatggcaaggtcagtagctttcctcagattctcagaaggcttcatcaactaaaatgtaggcctagcccggtggctcatgcctgtaatcccagcactttgggaggctgaggtgggcggatcacctacggtcaggagtttgagaacagcctagccaacatggtgaaaccccgtctctactaaaaatacaaaaattagccaggcatggtggtgggcacctgtagtcccagctactcaggaggttgaggcaggagaatcacttgaacctgggaggtgtaggttgcagtaagccgagatctcgccactgcactccagcctaggcaacagtgagactccgtctttaaaaaaaaaaaaaaaaaaaaaaaaaacatagtttcaatgcctaaactttcagtaaataagatattatcttagtcgagtcttttcaaagtttttgaagcactttctcagttacttcattttaaataaaatgctctgaacaagatcataagcatgcacctatgggatgtcctggtgtttcgaaatgggcactggtggcatgggataaaatttattgtgactctgtcagatgtggattcaaaacaggctgtatctccgacttaacagtgcattaaaatggcagctagggccggccatggtggctcatgcctgtaatcccagcactttgggagatgaaggtgggcggatcacctgagattaggagttccagaccaccttggccaacatggcaaaaacccatctctactacaaatacaaacattagccgggcgcctgtagtcccacttactcgggaggctgaggtgagagaatcactcaaacccagaaggcagaggttgcagtgagctgagatcttgccactgcactccagattaggcgacagagcgagactccatctcaaaaaaaaagaagaggcagctaaaatacagtgcagtggcccaggtccatttcagatagaaacagccaggcaaaccccccattctagtctattttattctaagcagattatctcacttagactgacatcagcaaaagctttagtctgtagcacattcaaaatgaggtatatgtgaccaggagttagtagaaataaaacatcgttgtaggccaggtgcggtggctcacacctgtaatcccagcactttgggatgctagggtgggcacatctcttaagcccaggagtttgaccctcgcctggacgacatgatgaaaccctgtctctacaaaaaaatacaaaaattaaccaggcatggtggcgtacgcctgtagtctcagctacttggtaggctgaggtgggaggatgactctagcccaggaggcagaggttgcagtgagccagggttgtgccactgtgctccagcctggtcaacagaatgagactctgtcttcaacaacaagaacaacaaagaaccacctcgttgtattcttaaataagtttaaatcctgaagcgccagttggcgttattgatgttttaggagtgcaggaatgggtgaggtcccaggcttgctttagatagtgataattagcactgactgccacgctgtttttaggaggccttaaccaatgtttcccttctttctccttctcaaatggctgcttcctgacctccgcctcctgctccaggatttgcgcaagcaggtagcgccgctgctgaagagtttccaaggagaggtaagcttttctattcattttctatcctgagccacccttcgtggctaattggtctttttattcacattaaagaaatgctccgggcaaaaggtgctgcccagatggtgccttcccggctgctccgacccagcgtcatgcagattttgcgctctgtgatgtaattttccattgggtccttggtgaaagccctcctggaaaaggaagctatgctcagaatacacagagctgtggtggattgccagcagaagtgccccgtgtgtggttgcaacaggcaggttgttggcgctacggccttcaggagcccatgcatcccctctaggaagtcgccttgtccccctgagctggtctggggctgccactgccatgagtgtgtgccataagtgtggtgctttgctgagaggctggcgggggcacagggaggccacttgatcacaggcttgaaacacagagcatctagcagaagccacgaggagcaagcctaggctcagtagaaggaagtggtttctaacggatccttccagagaaggacggagccatctggcagacggcacgtgggtggcaagtcacctgggacatccgccctggctacctgttagcgggaacagcagccatagaggggactgggctccacgtgagtgacactctttgccagccctttgtgtgaagattcagtgatgtttagaaaaccagaaattatattattcttgcggatttattgaatctcacctctttagcttctcccgacggaaaaacagaaagtggaatcatagcaggctgataaggaaaggaaacgagacatttccaaagcccctgaaagagcccatattggtacagtcttagggatttttttttttttttttttttggcgacagagtcttgccctgtcactcaggctacagtccagtggtgcaatctagtctcactgcaacctccgtctcccaggttcaagtgattctcctgtctcagcctccccagcaaatgagattgcaggtgtgcaccaccacacccagctaatttctctatttttagtagagatgcagtttcaccatgttggccaggctggtctcgatctcctgacctcaggtgatccacctgctttgacctcccaaagtgctgggattacagatgtgagccactgtgcctggcagggattttattttcttgcaactgctaagtcacagggaacacatgggggaagggacaggagagatatggccgtgagatacaggagagatatggccgtgagatacagtaggttcctcttgggacacaggtgatgtgggccttatatatggaaggctgggttcctggtcccagagctctagagcaagttgtcgggcttccatttgggaaattcatcaactgggagcgagagcagggagtgagtgaatgaaggaggccagggcgattgtagccaaagacagagaggcgatttcaggacatcaaaagggaccagcgtagaaagaagacacagcagttggtgatggctggaaattttcgagggcagaacagtacccctctcttcttatgatcttcttcctgcctcattcagcccccatgcacgtagcttggtccggccagcaggacacctgcatcccagggcttggatggacttgaacagtctttttctcagaacttcatctccaagcccgtagttgatgagtgaggctgttacctgacacctacccacatttgatcttacctgttctgttacctgtccagcggcttttgggagacccactggcttcctagttctctcgctcaaagagttcagtgtgctttctaggtgtttgcttgtttttctttcttattgaaaaatttcaaagctgtgtaaaaatggaaagattagtacagtgaatacctgtatgcttttttttttttttgagacagattttcactcttgttgcccaggctggagtgcaatggcacaatctcagctcgctgcaacctccgcctcctggatttaagcaattctcctgcctcagcctcccaagtagctgggattacaggcatgtgccaccacgctcagctgagttttgtatttttagtagagacggggtttcatcatactggtcaggctggtctctcattcctgacctcaggtgatccgcccgcttcgacctcccaaagtgctgggattacaggcgtgagccactgcgcccggcccacctatatgctctttacccagatccacagttgctaacatttcaccccatgtacctcccccctcccctccccgcccaccacttttgctgaacattcagaagtaagttgcagaagcaggcactgtgtccctcaaacacacgtggaaggctcccgaagttaaggaattattagcattctcctacattaccacaataaccacaaatatcacacctgggaaaattcacagtaattccaggtcatctcatatttgatccaaaatcaaatttttccaattatccccaagatgtcttttataacggccctcctcgcaactgaggtccagtcaggttcacacattacatttggaaatctgtctatctaattttctattttaaaaagtgttttttttttttgagacagggtctcgctcggtaacccaggctgcagtgcagtggtgccatcatggttcactgcagcctccacctcctgggctcagcaatcttcttgccttagcactcccctgcccccaccgccagatagctgggactatacatgtgcaccaccacatccggctaatttatttttatttttagtagagacgaggtttcaatacattgcccaggcttgtatcgacatcccgggctcaagccatcctcccaccttggcttcccagagtgccttgattacagacatgagccactgtacccggcccctgcattatctcttttaatgtaggacatcctctccatctccatcaccttcatttctttttatttttattttttctagacagggtcttgctctgtcccccaggctgggatgaagtggcacaatctcagctcaccacaacctccacctcccaggttcaagcaattcttctgcctcagcctcccaagtagctgggattacaggcatgcaccacctcgcccagctaatttttgtatttttagtagagatgggatttcaccatgttgatcaggctggtctcaaactcctgacctcaagtgatctgcctgcctcagcctcccagagtgagtgctgggattacaggcatgagccaccgcgcctggcctgatttttttgtttgtttgtttgtttgcttttttgaagagtcttagcaaattatcttgtagattagcccacattctcagtaggataatgggtttgattcctgataccttaaatttgaaatacccaagaaacatctaggctaagcttccatttgcctatttttttttaaaggccatatgaaagctaatcataaataaatacataaaattatcatagattttgaacccacaaaagaaaggtaattttttggcaccattaattaatatttatcaagcctccgctaatttataaataaattttattatgtatacttaaggtatacaacatgatgctatgggatacatacagacagtaaaatggttatacggggaagcaaattaacatatgcatcgtctcccttagttactctttttcatgtgtgtggcaggagcagctaagatctcatttagcagaaatccctcatattgcaattatatttactatagtccttgtttgcacattaaatctctagacactcccagcatcatccctcccaaaatgtgacatttatattaaataatttgtacttttttttttttttgagatggggtctggctctatcacccagggtggagagcagggtggcatgatctcggctcactgcaacctctgcctccctggctcaagcgatttgcccacctcagcctcccaagtagctaggaccacaggctcttgccaccatgcctgcctaaatttttgtattttttggtagaggtgggagtttcaccatgttggccaggctggtcttgaactcctgagctccagtgatccgcccgcctcagcctcccagagggctgggattacaggcatgggccaccacgcctggcctggaagtggtttttaaaatattttacttccatcctttcattatgatgtgttcctattaaaaaggtgatcatgtgtggaatcccagcagtttgggaggacaaggcaggaggatcgcttgagcccaggagatcgagaccagcctggtcaatatagtgagaccccgtctcagtctcatgcctataatcccagcactttgggaggctgaggcgggtggatcacctgaggtcaagagttcgagaccagcctggccaacatgatgaaaccccgtctaatagactaaacatacaaaaattaggcgggcatgatggcatgtgcctgtaatcacagctacctgggaggctgaggcatgagaatcagttgaactcgggaggcagaggttgcagtgagccaagcactctagagccactgtactctagcctgggtgacagagtgagactccgtctaaataaataaataaataaataaataaaagtttcagataatgaaatgattacttataattattataacaaaatcataaaatgtaactcacactgaaattagatatcgattgattgattatgatacctaattttgggtgtttcacaagcccagcaaattgatgggtggtgtgggggaggtgtacccttaatatgaagtccaatttaaagcttattctagcccaacaatttagacaatccctttagtaaagtaatgcacataccctctaggaaaatgctgtctttccactagtctggccaatccttgcttctctccctgagaaggggcgtgttatggaaggttgaggggatgaggggctggctcagagaacctcttggtagtgggggacaagtgtcctcagggaggaaaatcctcttaagaaataacttgagtgctcgtattagagaataaatgaaaaacaatctatgaactaagcatcggctttataaaattacagtaggctggtatgatggctcacgcctgtagtcccagcactttgggaggccaagccaggaggatcatctgaggccaggagtttgagaccagcctggcctaacctagcaagactccatctcaattaaataaataaacaaacaaataaatgtacaacagaataagttcaaatagaatgaaagaaatgacaaatataataataaacataagaatagaaatgaatgaaaaaaacaaagagccaggagagaaacattgcaaaagtcatttatttgaaaataccactgcaactgacaaaccactgtactcatcaagacaaaaaatgttaggaataaaattggggatgacattgcagctgctgcagagattaaaaagataaagggaatgttataagcaactttctgccaataaatactgaagtcgaaaaagttccaaaattctgtaactaccaaaattgattaaagaagaaacagacaacttgaatagctttgtaactattactgaaatatttccataaggtctagacagtttccaagagagttttatcaatcattcatgaaatagagagttctcatacttagcagactccttcagaaaatagaaagagcgagcacttcttaactccttttatgaggctaatataaccttgataccaaaacaagacaagaacagtacaagaaaggaaaattaaaagtcagtcttattggccacgcatggtggcttacgtctctaatctcagcactttgggaggctgaggcaggcagatcactcgaggttgggagatcgagaccagcctggccaacatggtgcaaccccatctctactaaaaatataaaaattagccgggagtggtggcaggcacctgtaatcccggctacttgggaggctgaggcaggagaatcgcttaaacccagcaggcggaggttgcggtgagctgagatcatgccactggactccagcccaggtgacagagcgagactccatctcaaaaaaaaaaaaaaaaaaaaaagtcagtcttattattgaataaatacacagaagtcttttcaaaggtattagtaaattaagtccatcaagcttggtatatcccaagaaggctgttttgtttaaaatgttcaaaacttattaacataaatccatgtcattagcagattaaaggaggaaacaatttcagtagttatatgaaaagattttgataaaatttaaatccattcatgattaaaaactaccaacaggctaggcatggtggtcaggagtttgagaccagcctggacaatgtggtggaaccctgtctctactaaaaatacaaaaacaggccgggcactgtggctcacacctgtaatcccagcactttgggaggccgaggtgggcggatcacaagttcaggagatcgagaccatcctggccaacatggtgaaaccccagctctactaaaaatacaaaaattagctggacgtggtggcatatgcccgtaatcctagctactcagaaggctgaggcaggagaatcacttgaaccagtgagtcagaggttgcagtgagccgggatcgtgccactgcactccagcctggtgacagagagagactccgtctcaaaaaaaaaaaaaaaaatacaaaaacaaaaaattagctgggtgtggtgggtgcaggcctgtacacctagctatgcaggaggctgaagcaggagaatcacttgaacccaggaggcagaggttacagtgagccgagatcgcgccaccgcactctagcctgggcaacagatcaagattccatctcaaaaacaaacaaacaaacaaaaaaccctactaacaaactaggaatagagggaaacatcttaggaatagagggaaacttctttaatgtggtaaaaggtatttatcagaaacatacattaatcatcagacccagtggtggtaaaaaaaaaaaaaaaaaaaattcccagaaaaccaggaacaagacaagaatacctactattgctactttaattaacactgtactgcaaatcttagctagcagagaagacaaaaagaaataaagtacagatagctcttgacttacgatggtgcaactttaggatgatgcaaagaaactgtactttgagtacccatacaaccatgccgtttgtcagtttcagtacagtattcaataaattacatgagctggtgaatacctgatgataaaataggctttgtcttggataattttccccaactataagctaatgtaagtcttctgaatatatttaaagtaggctaagctaagctatgatgtttgccaggttagtttattaaatacatttttgactataatattttcagcctacagtataagtattgcaacagaagaaatcaaactgtcatttttcaagtgagcctcaattatttaaccaggttactagatacaaaatcaatatacaaaagtaattatatacccctgtatcagcagcaaacttaaaaagtcatttttaaaaaggatactactggagatagccagccaaaaaaaaaaaaaaaaaactatagctagaaatgaatgtaacaatacaagggaaatctttctagagaaagatgtaacatttatattgaaggatattaaaggagagttaaatggagagagagaaagtatacaaggagagaaatttccactactattgaagcgatcacttttctccagattgatcacagaatcagtcattgtagttccagtaaaaatcccaacaaaattttttttgttttgagacagagtctcgctctgtcacccaggctggaatacagtggcaccatttcagctcactgcaacctccacctcccggattcaaggttatctcctatttgatctaaaatcaaatttttctggttatccctaagatttcttttgtaacggccctccctgcagctgaggtccaatcaggttcacatattacatttgtgtaatcccaagtagctgggattacaggcgcctgccaccacacccagctaatttttgtgtttttagtaaagacggtttcgccaggctggtctcaaactcctgacctcaggcgatcagactgcctctgcctcccaaagtgctgggattacagtcatgagccaccgagcccggccccagcaagaatcttaatgaaacttttgaaaagctgattccagaatttttatacatatgcaagaacaaatggtaaataatagtgaagataatactgaaccactccaagttagaggaattgccctaccagattattaaagctgcagtagttggcagagaatgagataaataaaccaaaggaacacaataaagaaatcagaatctggccgagcgcgttggctcttacccgtaatcccagcactttgggaggccaaggcaggaggatcacttgaggtcaggagttccatacaccagcctgaccaatatggtgaaacttcgtctctactaaaaatacaaaaatcagcctggtgtggtcacgtgctcctgtagtcccagctacttgaaaggctgaggcaggagaattgcttgaacccgggaagcagaggtagcagtgagccgagattgtgccactgcagtccagcctggcccacagagtgagactccatctcaaaaaaacaagcaaacaaacaaaaaaaaaaaaaaacaccggaatctggcctatgcatatatatagaagctgaataaattgcaaagatggtatggatcagtgaggaaaggggggacttttcatggtcctctgacgattggcaaatccttatagattaaacgaagttgagaccgagtgcactggctgctatctgtaatcccagcactttgggaggctgaagcaagcagttcccttgagccctcgtgttagagactaacctgggcaacatggtgaaaccctgtctgtacaaaaacttacaaaaattagctgggtgtgatggcacacgcctgtagtcccagccacttggaaggctgaggtgggatgattgcttgagcccacaagttggagacttcagtgagctgttgatcgcgtgccactgcactacagcctggctgacagagcaagatcctgtctcaaacagacaggcaaacaattaactagagttggagccctaccttacaccgtgtggaaacacaaattacaaggagagtcttagatcaaagctttaaactttatagaataaaatataaaagatgatgactttgggctgggtagaatttctttcttttcttttctttttttttttttttgagacggagttttgttcttgttgcccaggctggaatgcaatggcacgatcttggctcaccacaacctctgcctcccgggttcaagtgattctcctgcctcagcctccagagtagctgggattacaagcatgcgccaccacgcccagctaattttgtatttttagtagagacagggtttctctgtgttggtcaggctggtctcgaactcccaacctcatgtgatccacccacctcggcttcccaaaatgctgggattacaggtgtgagccaccacgcccggccctgggctgggtagaatttcttaaacagaaaaccataaaagagattgttgcagtaaactaccttaaaatttttaaataggagcttttttcatggaaagataccctaaagaaagtggaaacatggccgggtgtggtggctcatgcctgtaatctcagcactttgggaggctgaggcaggcggatcacttgatgtcaggagtttgagaccagtctgggcaacatggtgaaaccctatctctgctgaaaatacaaaacttagctgggcatggtggcacatgcctgtagtctcagctactcgggagactgaggcacgagagttgcttgaacctgggaggtggaggctgcagtgagctgaaagcattgcagtccagcctgggcgacagagtgagactctgtctcaaaaaaaaaaaaagcagaaagataaggccagtacactgctagctccatggtatgttcatgtgaactagaaaaaaggtttgccgttctcaatacttttcacatcacctgttggaaacttgccataataaagattcatacttacctcagtgtttaccgtgatagattcagacatccagaatgtgaagcatactgtctagggctgtgcatcccaccgttgtatgtggggtaaccttggccatgatttacaaatctggaagaggtagttgtcacacctgtaattaacaatgttcacaagatattcaaaatgctcgcatgtcaatggggggagaaacccagtaaggaaatgagtacaagtcatgagcataattgtcagaacattggaatggtcagtagctatatgaaaagatgtctaggttgcataataaccagggatatgcagattaaaataactcatctgcaagttattcctcctgaccaagttggctaaaattaaaaagtcaagttaggagcataagttgatttaaactttttgaaagccaatttggcatctggtgataaagactcacctgtaccttgacgcggcagtttcactcctaaatatatacgctaaagaaacaagcatggcgggtgcggtggctcatgcctgtcatcctagtactttggcaggcagaggtgggagtggcgcttgagcccagaagtttgagaccagctgagcaacatagtgagacctccatcttgacaaaaaaatttaaaaagttacccaagcatggtggcacatgcctgtagtcccagctactcaggaggctgaggcaggaggatcacttgagcctgggagttggaggctttgatagcaacactgcaccccagcctaggagacagagccagaccctattttaaaagaaaattaaatagataaataaacttatttgccctggaaaaccagttcagaaattttgaaaatagttaacatatgaaaacaacccagccggccatcaacaggaaaaagaatatgataaaactttgttgtaacaaaagattaataaagaaaagcatatggatttatttgctgaaagttacgagctctgtatacccagggcctctccttcacgagcactaaataagtgtttattggatgggtggatggaagcatcgtcctcatcttacagataaaaggactaaacccgagagaggattccaagtcacacaggtcataatggcaggactggcctcgatcctggggccgtctggcatcccagaagtgctaaggttggtgtgctctgatactgcttgagcggggaggaagcagtgccttcagcccctccctgatctcagccaacctttccagtctttgactgacactttgagaggccgagacaggcggctcacttgagcctgggagctccagaccagccttggcaacgtagtgaaactccatctctacaaaaaaatgcaaacgttagccaagtgcggtatcatacacctgtagtcccagctacttgggaggctgatttgggaggatcatttgagcccaggaggttgaggctgcagtaacctatgatcacactgttgcactccagtctgggcaacagagcgagaccctgtctctatttcaaaaaaaaaaaaaaaaaaagattgatgttcatcttgcatacagtgctctgcaaaccctgcctgaagcccccttcccttctaaccagcccctcctagacaaattctggagcttggtgcattgtctcgtgtacatccataactgtgtccatgcgctttgctacaaccacgatctgcatcgttggaaggagtggagcccaggttaactgtgaatttcatcacagtatcacctgctgacatggcctgagggagggaccaaggaatgatctgaaacttccctttgtgctgaatgtctcccttacatgcagcgcgctggccacgttcagagctgcatgcaggacgtgctctcggaggctgggttttactctctggtcttcattcaacgcaaccttttcgggagcctcctgcttccagctatgggccaaacagttgctaaagatgtctcattgaatacagtcaactaggatcctgctattctaatgaagggaaactgatgataaacacaaaaggcaatgttagatggcgccaggcactgcgagggagacacactgggtcttggggtagagcgggaagaggtggtagtgacttcttcagtcatccagggaggcctctccagggaggatgacggaacatcagaggaaagaagcaaggagaaccagccacactcagagctgggaaagagcagcaggaagatgggggcagtgagtgccagggctctgcagggatgggcttgcctggcagggagcaataccaaggaagttagtagggcccgggtcatgccagggccttgtaggcagaacccttaagtctctttgtagggaccctttggtctcccctttgaactaggccctttcaaagacgtacagtagaaagcaaattccccatgggcaccggcaggatgatttgacagattctaatcaaataattggggaaataaagttgggtgaactacagcagtctatgaatgagttaaaagtgactacgagtctgctgcccatcttgcagcccatatctgttgagctgtaacatatttaagcattcagatctaaaggccattgctaaataaagccagggcgtccatgtggttcgctccaaagagcatttcacagggagccagtccaggcgctgccgcccaccacctctgtgaccttgggtgagtctcggggcctctttctgcccgactttgctcatctgtaaaacgagtgggttacccagatcctcccccaaggagctccgtagctctgaaacctcatgagactcactggagcagtactttggttgactatcgctagcagaaccgaaaaggacattctccagcaatgtaaatctgttcaaaaatgggatgagctggctgggcacagtggctcatgcctgtaataccagcactttgggaggctgaggcgggtggatcacaaggtcaggagttcaagaccagcctggccaacatagtgaaaccctgtctctactaaaaatacaaaaaaaaaacaaaaataaaaaaattagccaggcatggtggtggcaccagctacttgggaggttgaaacaggagaattgcttggacgaccacctgccagggagattgtcacctcttatccattctttttttttttttttttttttttttttgaaatagagtctctctgtgtcacccaggctggagtgcagtggctcaccataatctctgcttcctgggttcaagcgattctcctgccttagcctcctgagtagctgggatttcaggtgtgcgccaccatgtccggctaattttgtattattagaagagatggggttttaccatgttgttcaggctggtcttgaactcctggcctcaagtgatcaacccgccttggcctcccgaaatgctgagattacaagcatgagccaccatgcccttgccttatccatccttctaaatgccagatcctccaagtcttcccaaaatacccagccagaaacagattcttcctcttctcatctctaatagggcttcatttatatctcccttttgattttttttttttttttttttgagatggagtcttgttctgtcacccaggctggagtgcagtggatgatctcggctcactgcaacctccacctcccgggttcaagcgattctcctgcctcagcctcccaagtagctgggactacaggtgcacaccactatgcctggctaattttttgtatttttagtagagacgggattttgccatgttggccaggctggtgtcaaactcctagctcaggtgatccgcctagtggttaggatttggcgctatctctcccttttggttttgagcctaaagacattctgcccttatagtttgcttaccaaggccttatgcttctaaaatgtagaagggaggatgtgtgtgtgagtgtgagtgagtgtgtgagtgtgtgtgtgtgtgtatgtgtctttgtacctgtttctgtccccatcttaccagtacttgcctaaatactgcattaagcatcatgggtgaaataggattagagaaggttggaccagatcagtggctcccaaagctgctgctgggttggaccagtgctgcactggccctatgagaattgctcacatgtttccagaaatacagctccccaggctcctaccctgacattccggtgtagaaggcctggggtggaaccttagaatctgtcatttttcaaagcccacctctgatgctcatgcactgctagttgtaggaaccactgggctcggttccctgaaagagctctttctcctggtaacaagttctgtgactctctctgcccactcagtcttcttagattggcatgttagaagctccatgacttgcctttgaaatatttttccagcttcaaagtcctggacttctactctggccgaactggcctgtgtattatgagtcacctgaacatactttttgatttcctgaaggctctgttattgttaagacccttttgctgttccctacctataaaactcatttccatcctttagggctgaaccgaaaagtctatctcctttgatcattttcctgaccatctcaacctatttctaactttttccctctttttttatcctcagctctattaaagtatcattaacaaagaaaagttgtatatatttatagtgtataatgtgatggtttggggtttttattttttgagacaggatctccctctgtcacccaggctggagtgcagtggcataatcagggctcactgcagccttgacctcccgggctcaagcaatcttcctgcttcagcctcccaagcagttaggactataggctcctggccaggctaattttatattttttcgattttagtaaagccgaagtctggctgcgttgcccaggctggtcttgaactccagcagcacagtctcagctcactgcaacctccacctcctgggttcaagcctcagcctcctgattagcagggactgtggacgtgtgccaccacgcctggctaatttttttattttttgtagagacgaggttttgccacgttggctaggctggtcttgaactcctgacctcaagcgatcctcccacctcattctcccaaagtggtgggattacaggcgtgatccaccacacccagcccaatgtgatgttttgatacatgcatacattacgaagtgatttccacaatctgacaacatacccattagctcactgtgtgtgtgtgtgtgtgtgtgtgtgtgtgtgtgtgtgtgtgtgtgttgagaacacttgagatctactgccttagcaaatgtcatatatatgattacaagattattaactatagtcaccatgctgtaccttggaaaagaaaacctacttttcttgcttaagtaaaacttttacccttttcaaggactgggggaccttgagtatgtgcagattttggtacacgcagggggtcctagcaccaatctcctgcgtgtaccaagggatgaccgtgtgtatagaaaatcacatgtttattacccatgtatttgttgttggatgcttagtctgtttccatatctttctattgtaaatagtgccgcagtatacatgagtgtgcagataactcttaacaatactgatttcaatccctttgtggtgttgctggatcgtattaattttggggggaacctccgtactgtttcccataatggctgtaccaatttacattcccaccaacagtgtacaaagatgcccatttctccatgtctcactagcactcgtgtgtctttttggtaatagcccttctaacaggtatcaggtgatacctcatcgtggttttgagtcaaattttccagatgattaaagatgttgagcagcttttcatatacctgtcagccgtttgcatgtctttttttagagagagacagggtctcactctgttgtgcagactggcgtgcggtggtgcgatcatggctcactgtagccttgaactcctggcctcaggtgatcctcctgtcttggcctcccaaagtttttgggattacgtgagccactgcgccaggccttatgtgttttcttttgagatccttagcccattttccgtttttttgttttttttggaaagagtcttgctctgtcgcccaggctggagaggctggagtgcagtggtgccatcttggctcactgcaacctccacctcctaggttccagcgattctcctgcctcagcctcccaagtagctggggttacaggtgtgtgccaccacacccagcaaatttttgtatttttagtagagatggggtttcactatgttgtccaggctggtctcgaactcctgacctcaggtgatctgcctgccttggcctcccaaagtgccgggattacaggtgtgagccactgcgcccggccaccttagcccattttctaaacagggtgcctgttttcttgttattgcattaacttttcccctctttccagcctgctcttaagattgtacatgctttgagggcccgtatcttgtcttagatgctttatctattctttgccttatggaagtggttacataaaacattcttagctgaatttccccctgcttctcgccttctccttgttaatgagtacttattgagtgtgatgtgcgagcatctactttggttcctagacgcccacaagcaaaataggtcagtgccctgctgggagtagggaggggttgtcagggtcttctttgggtttgtggccagacaggcgactgtggagcagaccaggcactctggggacaggatgatgcgttctggctggaagatacagggaggcttcccagggaccctaacacagcctgctgccctggacctttgctggggaactgacttctcagccagtatgtctgtccgcaggctcttgggccttctgcagtggtggaggtgacagtggtgttagccgtggtggtcactgtggtgatgtggctgctgtactgtcattatcttatggcaaaacccgcaagcctgacacacacagtgtctccctgtaagttcgcgccatgatggctcaattagggacccgtcggactgcggctcaacatccaggccagctgcataattgaaagcacattttctcctccaaagctgcagctggtttggttctgctcatgcagaaagggatctaaccttgcataacataggaaatgaacagttgagagagaagccaaattcaatttcagtcagatatgttgaggctaagtccatgatctatggaagccggggcaggagccgtgcgcctgtggaaaggggcgctctcagcagtctattaatcacggccgcccgcccggcgctgccgccactgccgggtgccactgcgcccgcgcgccccctccgatgtgggctggagcgcagccaagcactccagaagttaacctcttaaagacccggagctgctttctgttgaataaatgtaattttgtggtcagaaataaatgcttgtgatatagcaggagctttgaaaacaacggcaagctggagcgattacaaattgctccatgttgtacaagtcaacagcagacatcaaaattccacgtggagggcaaattgatttcggcccagagctctgcagctattcaataaaagtcctattaaaccattgtatgtaatgaacaatccagagcaaatctaatattttcagtggataattatttttaacatcctctcggtaactgctggtagatttcttggatgtttacagctcgaactcgggcagagtgggccttcccagctgtcatttggcatctccgccaggggacccgctccagggacccagctgcgtacatggctcctgaacatggggctctggccttggggttcaggttgccaaggaagggtgcatggggtttctgaatctcccagtgcctgggatgtagtaggtgcctgggaaatgtttgttgaattgagctgaactgagttgaaatgcacaagaggaagctctaagaaccccagaatgacttaggaaaatgatattgtggcaaagttgactcaaaacctgaggctgaagagaccagtgggttgcaggtaaggaaattgaggtcccttgtgatagaccaatgtcagcccctatgggagtcgggacagagctggcaccccgggaaaccccaggacttacccaattcacttcccgtttttggagatggactcttgctttgtcacccaggctggagtgtagggatgcgattgcagctcactgccacctccgcctcccaggttcaagtgattctcctgcctcagcctctgaagtagctgggattacaggcacgcaccaccacacctggctaatttttatatgtttagtagagacagggtttcgtcacgttagccaggctggtctcgaactcctcacttcaagtgatccacctgcctcagtctccctaactgctgggattacaggcgtaagccactgtgcccagcccccatttcactcctgttctgttttggtttggtttggatttttttttttttttttttttttttttgagacagtctcactctgtcacccaggctggagtgcagttgcacgatcacagctcactgcagcctggacctcctgggctcaagcagccctccagcctcagcctcctgagtggctgggactacaggtacacaccactacacccagctaatttttgcattttttttttgaagagatgagggcttgctacgttgcccaagacggtcttgaactcctggcctcaagcagtcctcccacaaaggcctcccaaagtgttgggattacaggcatgagccaccacacccagctcacttctgttcttgacagcttgcgaagtgcattctttgtcagggaggccacactgggagagtcgccaaagcgatcttgttgctcatctagtgttcccacccccaggatgctcccctaccttgctcatgacagggctgtaaccctgtccccttccagaccaagagcttctcagggaaggtctgttcattcattgattcattaaatatttgtggagcatgtatgccaggctagaccagaactagaccctggttagtggtggtaggtgaatgaatgtagccgttgccttcatgaagcttaacagtttagcaagatctgtatccccatgtggcacagtgcttggcgctctgttaagtgatggtggatgggtggatggattggtggatgaatgggtggatggtgggtgtgtgggtggatggatgatttgttagataaatgggaatggatagatggttgattgcatggagggagggtgaataggggatagatggatggatgattggatagaaggatggatggatagatgattggatagagggatggatggctggatgattggataaagggatagatggatgggtgataggatagagctatggatggatgaagggagagatggagggagggagggaaggagggagggagagatggatggatggataactggatagagggatggatggatgattagtctagaggtagggagggagggagggatggatggatggatggatgattagaaagcagtatgtgtctgtaagaatagattgactcttactcattttcgtctcctggagtaaaatcatccaacttgtaatgctcagtcatacagtatttatttgactatcgtggaatttaaatttctagggtattttattttctgcagatctcccttcccttggaaaaactcaatatggatgttaattaggttttactaaagttccatcaatttaatgcagtcgttctttaaatgaaactgacaccaaggaccacatggccaaaggaagcccacgttcctgtgtgtggttctgaggagggagcataggatgcagtttgataacagctgagagccctgaggagtttgttgctggatgtggagtattccatgtctcgtccctcccccagtctttttccagttgtgtcacaactccctttgctaataatattttgcacagcattttacgtctacaaagcaccatttccatgatgtcgctcacccttcgacaccaccctgtgctgggggcatcatcatcattctgagttaccaacaggaggggtagcagacagtccaaggggcaaggcagggactcccagctccaggctccagcctctcctcccctccaccctctcctggtcctgtcctgaaatctttggctcccttgaaacttgttatgcccgggcaaatgccaccctcgtgccactgtattcccaccacctccaatgagtgtcccccacctgatggggtcacacacttgtccagccacctgcacagaaaagcctcatggacacagccctgtgaggtcagaaatagaccgaacagggtcactcggttggaaggcgtggtagtgttagaacccaggtgtttgaactcggtctaatattcattccactctttcacacacacgtaagggcacatgaccactattaatcaaattttcaaaaaaaaatcagctgggcacaatggctcatgcctgtaatcccagcaatttgggaggccaaggcgggtggattacctgaggtcaggagtttgagaccagcctggccagcatggtgaaaccccgtctctactaaaaatacaaaaattagctatgcatggtggcacacgcctgtcatcccagctactcgagaggctgaggcaggggaatcacttgaacctgggaggcagaggttgccatgaactgagattgcgccactgcactccagcctgggcaacagagcgagactccatctcaaaaataaataaataaagggaatttgacataaaatcgttaatgttgactgtttcagcctgggtgacagagcgagactctatctcaaaaaaacaaacaaacaaacatgagctccatgtctgtttcatctgttcccctctaagtataaacttcctgagccttctaagtccagccaggtgggccagcggtcaccgagatccttcctcgctgggggatggaataggcctcccctgctttgctgctgttctttggccttgtcccctgcctcttttcttggaccacctacaaggacctagggggacacagtactgggggcaggagctgggaaaggcctgccatggttcactgatagtaagaaatagagactcactcggagaaatttcctctgaaatacagcagactcagcgcagccctttgggcagatgaaggaggctgagaagagcatcccttcagcaacagctgcgtgccagaagcttcgttccgttctgccatttcatctgcacagcagctcagcccggaggggagaggagtaaatgggcccagagagatcaagtaacttccttggagcttgtcagccttgagctgaaacttggactctgatgtcgaactccgaagcccatgcttattctgtaaagcctgaagagtgtcttataattgatttagaagtaggagaagagggggaacctgtgagattacactgtcttccagcataacaagaaaagagaaaccagttggatgcggtggctcacacctgtaatcccaggtgtgatggagaggccgaggcaggaggatcacttgagcccaggagtttgagtccagctggggcaacatagtgagatcccatctctaccaaaaaaaacaaaaacaaaaaaagaaaaacggaaacccatgaaatgatccatgggtacataggaagggagagaaactggttcctagggctgtgggaggaatgaccgcaggcctgccctgggaaaaagctttgcttttcagggagccccttgatgtttggggacttaggagagcaagtctggccctgagatgtgggaccaggcatccccacagagcacacatcagcagataagggctgccgctctaggaacagtcttgtcccagcgcaggcacgaggagggctcaggaatctggctgggagcattcctgccgtccctactgaggagctgccactgtggaccagaacacccccctgataggagcagactcccggggtgtagacactgcttcccttttcacaccgtctcctgaattttctcctgggttcctgcttaaaggagcggagaaaaccaaactgacaaatcactgatcttggagtcagatctggatttgaatcctgacatcatcatttgccagcgtgaccttgaatatctcatgtccgcttctctgtcccatccatataacaggaaatctctctcgcagagcagcgacgttatatgcacatgtttaaagatgatggcataaaagcagtgctggatgggagctggtagctagttattgattataggatcctctaggtcctttaacttcttcaatagccgtagtccccaggatttaaccttctggggctttccctgtatctctgtcccatccacactccagagtaacctcatctgggccgtttggggctggtggttccaaatttttgcctctggcctgggcccgtcatccaacgccaggcctccctggggctcccactgtgggtacctcgctaactaataatcttcatttcccatgtaaacacaggcacctgcgtatgccccatttcgggagaggtaaccagcccctagttgccctggccagaactctgggagaagctatgttcagtattagaccctgtgaattctttttattattattattattattattattatttactgttgtgttgggctctcgctctgctgcccaggctggagtgcatttgtgtgatcatagctcactgcagcctcaaattcccgggctcaagtgatcctcccgcctcaacctctcgagtagctgggactatgggcacatgccaccactccctgctaagaccctgtgaattctatttccctaacctcgctggaatcagctccctccttcccagcagttggctttctccctctctttcctggtctggtctgtctaccaccagttgccatcctgtcctgagtgatcgcttcatttcccaccctgattgacatcctcagggattccccttcagcataagctgcccccaccccgggcgtggtcccttgcacctccctccacaggctggcccctgcctgcctcctcacctcacgtatccccagtcacctcctctgctccaaggcacggcaggtccctgcccttctctgagcaggccactttgtttgaacacgtctctgtgtctttgaatagccctcctctccccactgaagccttctgcctcccaccacgaataaagatgatctttgtcttctttaaaacttgccctaagtttgcaaaacacaggatgtagagcagcatctaatagactatcatttgtgtttgaaaaaaaaaaaaatagggccgggcgcagtggctcatgcctgtaatcccaacactttgagagactgacgcgggcgtatcacctgagctcaggagtttgagaccagcctggccaacatgttgaaagcccgtctttaccaaaatacagaaaattagccaggcatgatggtgcgcaactgtagtcccagctacttagggtaggaaaatcagaggcagcagaatcgtttgaacctgggaggcagaggttgcagtgagccaagatcgtgcctctgcactccagcctgggtgacagagcgagactctgtctcaaaaaaaaaaaaaaaggaacacagtgcatgtctataggtgcttgtaaatgcataaatacctctgggaggatgcccaagactatctttacctccagaccaggcagctggatgacaggtggatgtggatgggaggaagacctacttttcactgtcaactttgttttcgctttgcttttctttttacaattaaatgacttttagtgtattcaccaagtcatgcagccatcaccctaattccagaacattttcgtcagctcaaaaagaaacctcatactggccgggcgcggtggctcacatctgtaatcccagcactttgggaggccaagtcaggcaggtcacttgaggtcaggagtttgagaacagcctggccaacatggcgaaaccccgtctctactaaaaaaacgaagtacaaaaaaattagccaagcgtggtggtgggcgcctgtaatcccagctactcaggagactgaggcaggagaatcacttgaacctgggaggcagaggttgcagtaagccgagattgcaccactgcactccagcctgggtaacagagtgagactccatctaaaaagaaagaaagaaacgtaatacccattagtggtcactcctcatttatcccaaccccaacccttggcaaccatgaatcccccttctgtagatttggccattccccccatgtctctgtagatttggccattcttaacatttcatatcaatgagatcaaataatatattagttttttgttcccggcttcttttacttaaccatggtttcgatattcatctatgctgtagcatataccagtacttgctttcattctttttatggctgaataatattccattgtatggatgtcccatgttttatttatccaattatcagctgatggccatttggagttttgtttccccactttttggctattatgaataatgcttctatgaacatccatatacataagtttttgtgcaggtaaacacttttgtctttcttgcctacctaggagtagaattgctgagtaatagggtaactctatttttaacattttgaggaatggccaaactgttttccaaggtggctgtgtaattttacatttctgtcagcaatgtaggagggttccagttcagtttctcgacatcctttctaacacttagtatcatcttttttttgggagacagggtctcgctctcttgcccaggctggaatgcggtagtgtgatctcggctcagtgcaacctctgcctcgcaggttcaagcgattctcctgcctcggcctcctgagtagctgggattacaggcacgtgccaccatgcccagctaatttttttgtatttttagtggagacagggtttcaccatgttggccaggctggtctcgaactcctgacctcaggtgatctgcccgcctcggcctcctaaagtgctgggattataggcgtgagccaccgcagccggccccattatatgtctttttgatgctagtcatcccagtggatgttgtggtatctcattgtggttttgatttgcatttccctaatgagtattggcattgagcatcttttcatgtgcctattggccatttgtatctttggagaaacatctattcatatcctttgcccatattctaattcagttacttttattaaatatttttaatttttgtggggatgtatatatatatttatggggtggagcacatgagatgttttgatacaggcatgctacgtgtaataatctcatatggaaatggagtatccatcacctgaagcatttatcctttgtgttacaaataatccgattatacttctttaattgcttttaaatgtacaattaagttattgactgtaatcaccctgtcgtgctatcaaataataggtcttaattcattcctcctggcttttttggtacccattaaccataccacctttccagccccactacccctcccagcctctggtaaccatccttctactttctatgtccaagagttaaaaattgtttttatgtttatatcccacaaatatgtcagaatatgagatgtttgtctttctatgcctggctaattgtttttttatttaatgagttgtaagagggcttatatattctggagtatcttttcaaaacttccattctgtgggttgtcttctcacttttttttttttttttttttttgagacagagtctcaccctgttgcccagggtggctgcagtgtcacgatctcggctcactgcaacctgtgcctcccaggtttgagccattctcctgcctcagactcctgagtagctgggatcacagttgtgtgtgccaccatgcccagctaatttttgtatttttagtagaaacagagtttcgccatgttggccaggctggtcccgaactcctgacctcaggtgatccacctgcctcagcctcccaaagtgctgggattacaggtgtaagccactgcacccagcctctcttttcagtttcttggtagcgtctttagaagcgcagaagttttatatttgatgaaatccaatttgtcgatttttcttctggtatttgtgcttttggcatcatacctaagaaaccattgcctaatccaaggtcataaaggtttacacctgtgttttcttttaagaggttttatagttttagctcatatattttggtctttgatttattttgagttaatttttgcatatggtgtgaggtagggatcaaactttgctcttttgcatgtggatatctggtcgtcccagcaacatttgttgaaacactgttcttttacccttgaattgtcatgtcactcttgtcaaaaatcagttgatcataatatgagggttcctttctgggctgtattgatctgtgtgtttatccttatgcccctaccagttcaggtcaatgtagttttgtatttagtattgaaattgggaagtgtgactcctccaaccttgtttcctttttcaaaattattttggttatttggggtcattgcattttcatatgaatcttagaatcaacttgtcaatttctgcaaagaagccagctgggtctaggcacaggggctcttgtctgtgattctaacactttgggaggccaagacgggaggatcacttgaacctaataattcaagaccagcctggacaatataatgagatctcatctctacaagaaaaaagttaaagattagccaagcatggtggcgcgttcctgtagtctcagttactccggaggctgtggcaggaggatcacttcagcctgggaattggaggttgcagtgagctgaggttgtgacagtgcactccaaccagagtgacagagtgagaccctgtctccaaaaaaaaaaaagccagctggaattttgataggcattaccttgaatgtgtaaatcaacttcgtgactattgccatcttaaaaatattaagtcttccaatccataagcattggccatctttccatttagtttagtgtctttcagcagtgttttgtggtttttagagcacaagttttgtatttcttttgccaaatttattcgtaagtattttatactttttgtgatgctattataaatggattttttttttttactttcactttcagatcatttattgcaaacatgtagaaagacaaatgtttttttacagggatactttgttgcattgagctccacttttttatgctttgaagatagtgtgtttcttcaaaaatggaagtctgtagcaaccctgagtcaaacaagtgtgtcagcattatttttccaactgcaggtgctcacttcctttctctttgtcacactttggtaattcccacaatatttccaattattcactattattatatctgatatggtgatctgcagtcagggagctttgatattactatcataattgtttggggacaccacaaactgtgccccatataagatggcagacttaattgataaatattgtgtgtgttctgactactccaccaaccagctgtttcccatctcttcctgtctttgggtttccctatttcttgagacacaacaatattgaaattaggcaaattaataatcctgcaatggcctattaagtgaaaggaacagtcacatgtctttcactttaagtcaaaagctagaaatgattaagctcagtgagaaaggcgtgttgaaagctgaggtaggttaaaagctggacttcttgcaccagttagcccagtcattagtgcaaaggaaaagttcatcaaggatatgaaaagtgctgctccagtgaacacatgaatgataagaaagccttatttctgatagggagaaaattttggtgatctgcatagacgatcaaaccagccacaacattctcttaagccaaagtctaattctcttaattgggtcttaattgtctcaagccaaagccctgactcttcaattctatgaaggctgacagaggtggggaagctaccgaataaaagttggaagctagcggaggttgattcatgatgtttaaggaaagaatttatctccataatacaaaagtgcaaagtaaagcagcaaatgctttggtggaagctgcagcaagttatccaggagatctagctaagataatcaacgaagatgatggcgctacacaacagattttcaatgtaggtaaaataaccttctcttggaagaagatataatctaggacttgcataggtaaagagaagtcagtgtcttgtctttaaagcttccaaatgcaggccgactctcgttaggggataatgcagctggtgacttgaagttgaagccattgctcatttaccattcggaaaaatcctagggccttcagaattaagctacacctactctgcctgtgcactagaaatggaatcataaagcctagatcacagcatctgtttatagcatgttttactgaatattttaagcacactgttgagacctactgcccagaataaaaaaaggttcttttcttttctgagacagtcttgctcttgtcacccaggctgaagtgcaatggcatgacttcagcacactgcaacctctgcttcccaaattcaagtgattcttctgccttagcctcctgagtagctgggattacaggctcccaccaccatgctcggctactttttgtatttttagaagagatggggtttcactatgttggccaggccagtcttgaactcctgacctcgtgatccgcctgcctcagcctcccaaagtactgggattacaggcatgagccaccacactcggctgataaaaagattttttgttttttgttttttgttttctggttttttttttttgagacagagtctcgctctgtcacccaggctggagtctagtggtgcgatctcggctcactgcaacctctgcctcctgggttcaagtgattctcctgcctcagcctcccgagtagctgggattacaggtgtgtgctaccacgcctggctaattttttgtatttttattagagatggagtttcactgtgttagccaggatggtctcgatctcctgacctcgtgatccgcccgccgcagcctcccaaagtgctgggattacaggcatgagccaccgcgcctagccgaaaggttcttttcaaaatatgactgctcattgacagtgcacctggtcaacaagagctctggtggagatgtacaagatgaatgttgtttccatgcctgctaacacaacctgcattctacagcacatggatcagggagtaattctgacactcaagtcttattttttaagaaatacattttgtaaggctatagctgccatagatggtgattcctctgatagatctaggcaaattaaatagaaatcctttccttctggaaaggagtcaccattttagattccatgaagaacatttgtgattcatgggagggggttgaaatagcaacatgaacaggagtttggaagaaatggattccaaccctcatggatgactttgaggggttcaaggcttcagtggaggaaggaactgcagatgcgggggaaatagcaagagaactagaattagaaatggagcctgaagatgtgactgaattgctgcaacctcatgatcaaacttgaatggatgaggggttgcttcttatgatgagcaaagaaagtggtttcttgagatggaaactactcttggtgaagatgctgtgaatattgttgaaatgacaacaaaggatttagaatattccataaactgagttgataaagcagtgactgggtttgagaggattgactcctattttttaagaagttctactgtgggtaaaaatctatcaaacagcaatgcatgatacacagaaatcttgtgttaacgaaagagtcaatcaagctagccaatttcattgttgccttaacaaattgccacagtcaccccaagcttcagtaaccacaaccctgatcagtctagcagccatccaacaccaaggcaagactctccaccagcaaaaagattacaactccctgaaagctcagataatcgttagcatattttggcaataaagcattttttaattaagatatgtacatttttgagacatagagctattacatacttaatagactatgatacaaacataacttttatattcactggaaaatcaaaaaatttatgtgacttgcttcattgcaatatttgctctttttgtcatatttgccttttttgttctatttttgagacagtctccgtcactcaggctggagtacagtggcacaatctcggctcactgcaacctccacctccagggttcaagcgattctcatgcctcagcctcccgagtagctggaattagcaggcatgtgccactacacctggctaatttttttttttttgtatttttagtagagacagggtttcacgatggtggccaggctggtctcaaactcctgacctcaggtgatctgcctttctcagcctcccaaagtgctaggattacaagtgtgagccaccgtacctggtctgtttttactttcttatggtggtctggaaccaaacctgcattatctttgaggtatacccgtatattgatcttgcattgtgaaagtcttgctgaatgtgtatgtttttatacatctacaatttttttattgtacacatatattatctactcacaacaatggtgatgtgaaaatctcaggtaggcatttatcccctaggaagcctgccccactcccccaccgggatttacccgagggaggtaggagaggggagcattaccccatcttaaactttttgggagcagcagtaggaatctgtgtctcccataggctggaatagaacatagcctagcacatcttagcctccttaaatgactttattgacagaatgaaggaagaagtgaagcgggggtgagcaagcagccagcacctccttcctctgaagagcctgctgcaggcaggtttccctgttgtctaagctgtgatctgctgtcctggagcatttacctgctcatgctggttttgcactgtggggagagagaagacagctaatctttcttccccaagacagcctttcagatagatgttgacagccagaatggcagatgtacttggaagggctttgtaaactcaaggagaatagagatgcttgttgctgtttttatcatcttggcttttaatcttgtgctgtcccctgccacaaatctcctctatggatcccacaccctttctccaagccagcggcttcttcggggcctctctagttttcctcttagaaactttactaagtgggaccgggtacagtggctcacacctgtaatcccagcactttgggaggccaaggcgggtggatcacttgaggtcaggagttcgagaccagcctggccaacgtggtgaaaccccatctactaaaaatacaaaaattagctgggcgtggtggcaggtgcctgtagtcccagctactcgggaggctaaggcaggagaatcacttgaacccgggaggtggaggttgcagtgagctgagatcgtgccacctcactccagcctgagtgacagagtgagacttcatctcaaaaaaaaaaaaaaaaaaaaatttaaaaccctcaagatttggcctgcgtacgtgtctgttttggacagcatccgactcagtcttagctgacttctagtgtttaatgtggcccttcaaaccatgctttgctcttgaaaacattctacagccagacttcgagtgagacaaaactaccctatcatatccctgcagttttgttgatttttattgtcctatagtccgacagagctcatcgatttgaaaattcttttaatggcctgtgtttatttctaaatcattagcttgtaaactcccagggcatagaggctagtggattgttcttgaatatgccgtcttcactgtggtcttaaatgttgcttaggggccaggcgcagtggctcacgcctgtaatcccagcactttgggaggccgaggtgggcggatcatgaggtcaggggatcgagaccatcctggctaacatggtgaaaccctgtctttactaaaaaaatacaaaaaaagtagctgggcgtggtagtgggcgcctgtagtcctagctacttgggaggctcaggcgggagaatggtgtgaacctgggaggcggagcttgcagtgagccgagatcacaccactgcactccagcctgggagacagagcgagactctgtctcaaaaaaaaaaaatgttgcttagggtcctggtcctccaggactttccacatcttggcttcctgcttgatttgatcacgacggggaataacctatggtgtggtggaaagaaaggtgctgactttggatttattagcgaaggttagtgctgttgacccggtttctatccagatggtgtcagatacttaatgtaggaggttcccacatttataatcacaacagctcaacaaggagggagttactaccctcacttaatggacgaagagatcaaggcttcagtatatatatacacacacacatatatacatatatatatatacacacacacaaataaacacacacacacacacacacacacacacacacacactttgctgcccagtcctggagtgcagtggcatggtcttgggtcactgcaacctccaccttctgggttcaagcaattctcctgcctcagcctcccaaatagctgggattacaggtgcctgccaccacacctggctgattttttgtatttttagtagagatggggtttcaccatgttggccaggctggtcttgaattcctgaccttgtgatctgcccacctcagcctccaaaagcactgcgattacaggtgtgaaccaccgcgcctggccttttttttttttttttttttttggagacagactctcactgtgtctcactctagcccaggctagagtgcagtggcatgatctcagctcactgcaacctccgcctccagggttccagtgattctcctgccccagcctccccagtagctgggattacaggtgtccaccaccatgcctggctaatttttgtattttcaatagagacaggtttcaccatgttggccaggctggtctcgaactcctgacctcaggtgatccatctgctttggcctcccaaagtgctgggatttacaggcgtgagtcactgtgcccagccaaagacttcagcatttaagtaacctgcctcccggtcacccagccagtgtgtgctggaactaggattcaaacccaagtctgtcttttgatcaaaccacacactctttccattgaccatgtggcccccagccccagtgcgcaatgctggatgttatcatatccctaggaggggccaggagccagggtccaagtaacttggtgggtttctgcgtctgagaaatgaagctggtgagacggcggttccttcactgttttccaagggctgccacggctttgatcttgacagcaaccaagatgtatctccccactttgcagatgaaaaaactgaggcccagagaggttaattcaatggttcaggcagagcacctgttttatgttggagctggaaatcaaaccctcatgtgccaacagcatgcccaggcccttggctgtgtgtggcgtggacttgcctaccacatgggcatggccaggcccctgtggtgcagtggagagatgagccttttttatttcaaaatacacagcacttcttggccggtcacagtggctcatgcctgtaatcccagcacttcggaaggctgaggcgggtagatcacttgagctcaggagtgagccactgtgcccggcactgtatgttactctcttagagatatggccaactcgtgagatctgtaaccatcagcttttactagattatgctgcagtaacaaacaaactgctacaaatctcagtggcctgtggcaaccaaagatcatttcttgttcatgtgtcatgttgactagggctggctgtgactgtgccccagccccgtgggtggtcctcattctaggatctcagtggaggaagtaggtcctataaggtccttgcagcagagggagggagcacactggctcttaaatcttaatgctcagataagacaccatcacttacataccattggccaaagcatttcgtgtggctatgcctgacatcactgaggagggaaagcacccagggggaagttgctgttacaccacaagtcacgtggcagtgggcagcgatgtgtgacgcctcctccagggagcctagatggtagttgggagcggcagcagcatattccatgtgactccgggaacccacagcacagccgtgctggcactcacatggttgggcactttctcaccccttccatatctcagagatctggtggatttctatgaaacttgttttctaaacctagactgagtttttatactatcataagcggatactgattgagagctagattaaaataccttcctatagacatttgtctttctcttattttatttgagacagggtctcactgtcacccaggctggagtgcagtggtgcaatcatagctcattggagccttgacctcctgagctcaagggatcctcccaaagaggtgggaccacaggcatacaccaccacacccacccagccaattttttattttttgtagagacaggatcttgctacactgcccaggttgatctcgaactcctgcactcaaacgatcctcccaccttggcctcccaaagtgctgggattataggcgtgagccactgcactacacatttgtctttaaatgtaacacttagccgggtgcggtggctcatgcctgtaatcccagcactttgggaggccgaggcgggcggatcacctgaggtcgggagttcaagaccagcctggccaacatggagaaaccccgtctctattaaaaatacgaaaattagctgggcatggtggcaggcacctgtaatcccagctactcgggaagctgatacagaagaatctcttgaacctgggcggggaggttgcagtgagccaagatcgcaccattgcactccagcctgggtgacagagcgagattccgtctctaaataaataaataaatgtaacactacattaaaaaaaaaaaaactcagccttatgaaagtgatgttgctgaaaacataaccgtggaatccagtagcggccattagtgcagatgtgcgggtcactgcaggaagacagctggagagcgctgttgggtgtgtacagtggagaaagacacctcccaggagctactgccagccaagtggctgtcatcatctcacagcacacaaaacagatgcttactacacagagaactctttacatattaagtatttccttttctttttttttttttttttttttttgagacggagtctcactctgtcgcccaggctgaagtgcaatggcacgatcttggctcactgcaagcgcggcctcccgagttcacgccattctcctgcctcagcctcccaagtagctggaattacaggcgcctgccaccacacccagctaatttttatagttttagtcaagagagacgaggtttcaccatgttggccaggctggtctcgaactcctgacctcaagtgatccacccaccttggcctcccaaagtgctgggattacaggcgtgagccaccgtgccttgtcaagaaccctttacatattgagcattttcataaatatttaaacctggattcctgaacccttgggtcacatctgcagaccatgcagttggccattgcggaagatattaaaagcatattaaacacccactgcgtgcccgtggtcgggaggaaaaacagttgatgctacagcttagttttccaggaattcagtatccctgagtcaggcagccttatctgtcatcctagaactccaggacagccccaggtggtggtgggaggggccgcggctgggagatggagctgctctgagcctgcagatcagggtagcattcctgggaggcgccttccaggcggaggggaaattgctcatgtgttctgggaactgggagtgactgggtgtggcaggagtgtgaggcatggcaggaggtgagcctgaaaaagaggctgatccctcagagcaggacaggttttacccaaggctgcaggccagtgtctaaccgtctctagatccgtcctggtttagcttcttccaaatagttttgtgtctgtgtgagagtgtgtgtgaaacggagttttgctgtgttgcccaggttggtcttgaactcctgggctcaagcgactctcccaccttggcctcccaaagtgctgggattacaggcatgagcaacggtgccggctctaaatggttttaagggcacggtacctacctcaagctaacgtgcaggcaggcacgaggtagctggaattctagcctaggattctctcttcagcaattcttgccttaagacctcaccttagacgtttgctcattcacagatccctccccttctcagagggagctgtgttaccaagccttggcttgtacctccaaggcatgcagtggatgggctgagctccctgcagggagtcaggcgggtgtgtggggggcatgaaggtgagcaggacactgtcccttcctccctccctcccacggatgctcttcctggctggtagccatgtggacacctggggggaagctgttctgtgtggcagagtcactgtgttgtgtctggtactggggcccttgccagggtaggtcagtgactcgtccaggccctggaggctgctgctgtcccctcctcgtgcagaggaggtggggctggcagtcaaagcccaggctccctccctccctctagactcagaacagcccaggaacccagctcgaggtctggaggaagtgatgtgtgcattgggtcttgcagcatagataggttttgagtggacggagaggttagcgaagggtgttccaagtaagcaaagcacggaactaggaagtcactggctgcagcagggaagtcacacaaagggacaacctaccacagactgggtgagctgcagagggaggatggactaaactccaacttcagggtcattctggttgtttttttttaagacagggtctcacttggtcatccaggctggagtgcagtggctcaatcatagctcactccagccttgaacccctgggcccaagcgatcctcccacctcagcctccgaggagctgggactacaggcgtgtaccaccgtgcctgtctaatttgtatttttttgtagagatagggtctcactatgctgcccaagctggtcttgaattcctaggctcaagccctcctcccacctcagtttcccaaagtgctgggattacaggtgcatgccaccatgcccagctaatttttatttttggtagagatagggtctcactctgctgcccaggctggtcttgaactcctgcctccatttcctaaattgttgggattacaggcctgagccactgcgcccagccttgaggcccattcttgtctgcggagcggaggggactttatcatttagaaaaggatcttttaagtcatctcttttaagaaacctcatggtccatttgcatactgaattcattaaactcatcggcctgaccgtgttcctcaggactgggctggaatttccctgtgttagtggaagagggcacggggagaggactgagagtcttggtccctgtgatacagctctgatgagtggaggaacactggggtttttggtttttatgccggtttagataaaatgacatggatacacgtggagtggttttttttttgttttgttctgagatggagtctcgctctgtcgccaggctggagtgcagtggcgtgatctcggctcactgcaacctccgcctcctgggttcaagcaattctcctgtctcagcctcctgagtagctggcattacaggcgcctgccaccatgcccagctaatttttgtatttttagtagagacagggtttcaccatgttgaccaggctggtctgcatctcctgaccttgtgatccacctgccttggcctcccaaagtgctgggattacatgtgtcagccaccacgcccggctcagtggagtggttttaaaaccccgatgtccacggggctggttccttctgctggctgtaggggagaatctactgtgtccctgtcccagcttctggtggtttcctggtcatcttcttctttgtagatcatcagcccagtctctccttcatcgctctgtgacatcctacctgtctacatgtctgtttctgtgtccaggtttctcctccttattggatccaactggacgagggcccaggctaatgaccttgccttaccttgatcacctgcagagaccctagctccaaataaggtcaccttcacaggtattgggggtcaggacttcatcatctttcaagagacacaattcaacccattatagccccgaagtgtgccgtgcaaattaccaaaccccacatcctggggaataacccaaacaggagacaggaggacagagttcaggatccttccagatcccagcccttgcctccaggagacgcagccacccggtaccctgagtcggaatacctcggaagtgaggggccctccctaggcagatcctaagccagaaagagaagcctctgtgtggccatcaagcggtacggacagcagccagggcgtctgcccagcttcctggacagactctgctacccacctgcctctcttagaagagccccaggttgcgttccaattcatctggagaagcaactccaaatccgttgcttactctagacatctataatatgtgggcttaggtacagttgaaacagtgccatttagacagttcccaaaatttgtaatagatactgagaaagatacatgatacgacagggaaagaaaacacaacacactatcttacgtataggctgatttcaagtacgtacatacacacacgcgttttaagcagcttgattgagatataattcacataccatataattcacccatttaaagtctggagttcattgacttttaggatattcacaaagttgcacagctgtcaccacagacaattgtaaaatgttttcatcaccccaaaaggaaatcccacacccttcagttggcatccaccagcccctccttcccacccacccccagtctgagaccactcttaatgtataatacatctgtctcttgtttgcctgtgtgtctgcatttcatgtaacttttttttttttttttttttttgagacggagtcttgctctgttgccaggctggagtacagtggtgtgatctcagctcactgcatcctccacctccggagtacaaatgaagcaattctcctgcctcagcctcctgagtagctgagattacaggtgcacgccaccatgcccggctaatttttatatttttagtagagatggggtttcatcatcttgaccaggctggtcttaaactcttgacctcatgatctgcccacctcggcctcccaaagtgctgggattacaggtgtgagccaccgcacctgaccacaactctattttttttttatataattaggaaaaaaaaatagaaataaagacctgatagtctgactcctgccggtgagtggaggatttcaattatacttttaaattttttttctatatttttgatatttttctgatcacacaatgagcatgagttgctaataatgggggagggggttattttaaaaacaaggcatggtcttgtcatattaatagtccttgtaggcaaggcatggtggctcatgcctgtaatctcgcctgacccctgaggtcaggagttcaagaccagcctggccaacatgacgaaaccccgtctccactaaaaatacaaaaaaaaattagctgggcatggtagcacactcctgtagtctcagctacttgggaagctgaggcaggagaattgtttgaacccgggaggtggaggctgcagtgagctgagactgcgccactgcactccagcctgggcaacagagcgagcctccatctcaaaaaaaagtccttgcatattgttctgagattctactcaacaccaaattcacaaccttgttttttgttgttgttgttgttgtttaatttgagacatggtctcgctgtgttgcccaggctggagtgcagttgtacgaacacagctcactgcagcctcgaactgctaggctcaggcagtcctcccacctcagcctcccaagtagctggtattacaggtgcattgccaccccgcccagctaatttttttgttttttgtaaaatttttatttttaaattttaatttgtagatagctcattattttgcccaggctggtcttgaactcccgggctcaagccatcctcctgtctctggctcccaaagtgctatgattacaggcgtgagccaccacacctggcccagaatcacagccttatcttatcgggttgagggggtggaaatgtgtctgagttccaaacaattgacttcaaattggaatcttggtgcacagcttgttagaagttggaaatgcttgcattgcgctaggctgctatgtgttcgattttctaggcccagctcccactagccatcgtcccccagttctgagcgccccacatccttaatcaggagacctctctcagcccttaacaaactgcccggtggctcaggtgagaggccctgtaattaaaccgcatcctttgcctctgtaataacatcggagacagcatagttctaggaggggacagacggaatatataatttcctgtcctttgcctgagccagtatgacattggtacatgtgcagtcttgcgtgtttcggctgtaaagtgcgatctgttgtctcagcaagtgtgtaggtaagctaaatattctaacaagtcagtccaaccatggcaggctctttgcatatgcgtccagcatagttgatgaacagacgtctacactagaggaaactggctcagttagtcagttcacaaaaccaatcctggccaccatcgcaaaaccttgccagttgcctaatctggaatccccgggaccgtcctcaattcacctggttcttctgggcctcacgtcaactgtgtgtgtcgctgatctctccagccgccctctcctcctcctcgacacccacaaccactgcccagcgcatctcactcggatgaaagcagtgacgtccgagggttctcttcctccctgccccctcctgtgctctttccaccctgaccgctgctcaggtgatgagggtctccctgcaccatgcacccttgtgcccctcaaaatctcaccccacttgattgtccagctgcgtcacccacagctcctgcatatgtatccgcgttcccacctggcagactctcgtgggtcccctatgccccatggtgtgttgtagccgtgttggtggactcttaatctggactccaggaatagagcacaagctgacatgcaaatgagtgtcttaaaacagaacacataggccagacgcagtggctcacgcctgtaatccccgcactttgggaggctgaggcgggcagatcacctgaggtcaggagtttgagaccagcctggccaacatgataaaacctcgtctctactaaaaatacaaaaattagtctggcatggtggtaggcacctgtaattccagctacttgggaggctgagggcaagaatcgcttgaacctgggaggcagaggttgcagtgagctgagatcgtgctactgcactccagtctgggcgacagagcaagactctgtctcaaaaaaaggagaattttatgaaattctttgctcctgggatttgaatgtgttcgtccgtttacatgcagcatcttacccgtccacctgggtgaaatgctttttaagactctgctctaaggtcacaactttactgcctgaagttcccttctgcatgtccccagggatttaattacttgttaattacatacctgtttccctcctagaccctgagcttctgggggtaggaactgtctcttcccacccacctctgatccccagcagtgtctagcacatggccagctcttaagtcagcatttggagaagacaaaagaccaggaagggcacgccagaccattctctatggaagacccacccagtgttccctgctgtatagtgaatggctccatactcccaaatctctgctcctcccttgtttaccttcatgaacagggtccttttgtgtttgcaggcatttcctctaagaggctgaagcccagttgtcaagcatctcccttgctacgggaattcactagatgtgtaatgctttgtaaattacctcttgacaaatgttgagctctttgtttttcttttctttctttccttccctttcagattgatgcactgagtaaaagaagcaaggaagctgaagcagctttcttgaatgtctacaaaagattgattgacgtcccaggtaagccccggcagtaatggcccaccagtggggggcgttgtgtctggtgagtcggtgggtttttggctcattcttcttggctttcctaaggaaaataaatacaccatcagtggcaacttccccccaagaaaccagggagtgcaggacacatgaattcttcacaacccagactttgggtacggagggaaattggatgcacttgttgaagtactcacgtaatctctaggggatgacttcgtaaaagcagagatccaaatctctggggctacagcataaaaccctgcacgtactgcagagaagatgcagacctgatgtgtgtatgctgtgtggaagtccctcatattgcccaaagccacctttaagactttaggaatggccctactaagacacctggagtgtcccgctcccctgccaggtcatccaagatcagtggcccctggacaagcccttcacttaagggttatgggcagagggtaactgataatccttgcagctacaaccaagtatatcagttgtttcttttattttttttttctaattttatttatttatttttgagacagggtctcgctctgtcgcccaggctggagtgcagtggcacaatctccgctcactgcaacctgcacctcccgggctcaagcgatcctcccacctcaacctcccaagtggctgggaggtacgtgccaccacattcagctaatttttgtattttttgtacaatgagtgcgatgaggtctcactttattgcccaggctggtctcgaactcctgggctcaagctatcctcccacctcagcctcctaaagtgctgtgaggttacatgcaggagccaccacgcctggccctgtttcttcttttagagggattgaagaattaaaatttaaatatgtttgtgaggcattctaagaggtgatggcttccgattctttattctggaaaagtgagaaggcaggtagagtgccttgaactctctggtcctgtttgtgggtcctcgattgccttagaatctggagtaaggtgatggacataactatgtggggcccagctcagccctggagagatgctgatcagaaaattaggaaagtcacttgatgcctttttctgccaagcaaagaattggaattaccaccaccctcccctccccacccattacagttgtgcccttgcccttgttagcaattctctgaatatcattgacatcattagagctacattaacagagcgaggcagactcaggtctcctttgtacctgtacttgtgttctgattcaggtctaccacgggctttgctgtcccctcttggagctgggattaatagaggtcacaccaaacacgggatggcagaaagcacttcggacagggaatgaggagacccagattctccttccctggatgacattccttttcctctctggacttcagtgttctcatctgtaaaatggaacagggtcagggaacagcctaatcgtagagaatggtttgctttgttctaaacttttgctgtcttaggagcttatctagttattggttccaaattctagccttttggttttctgtgagagtttgtatctgactaggagttccctgaagaacctgactgagcttcacgaggaggctccttcacagtaaaatggatcagagtgttaccactggagggtgtccaggttcttggcgttttgagcaatgaattggacaaaatgcacaaagcaaggaaagaatgaagcaacaaaagcagatatttactgaaaatgaaagtacactccacagggtgagagtgggctgagcagccgctcaagggcccagatacagattcttctcgggtctaaatatccccttgaggtttcccattggcaattggtgttcaccccatgtaaatgaagtggtggccctcattcagtctgatcagttgcagaaagcaaccaaccagaggctgaagtgaagttataaaggtcacactcctatgcaaacatcttgattggttgcggaaagtaaccaatcagaggctaaattgaagttacaaagttgtacttctatgcgaacgaagacttggccctgcaatcagtctggttggttgcaaccaatcagaggctgaagttacaaagttacgcttctctgcaaacatctgattggttgcagaaagcaactaatcaaaggtactttcaatttcccatctgcagggcagaaaaggtggaggtttgcaaaggaagtagacgctggtccttttgttacttaggcgtggcaagtgggggtttttccttcgatttagttctaggaagtcagggtgaatcagcctttggttccctgcctgcagaccctattttcctgcctcaagagcactgtccctcgggcatcagcagcctggcgggcatcactggcattttcttgtgcataaggtagtgactgagaattttctctctggactatgtcatgtccatactgacgcagggataaagaatttacagaaaaagcatgacctgggctttgagaaattttattttgtgtttcgaaagagttcattctttgactttttgttggttcctcaggctcaggaaggttctgctccattctattccaagaagttcttgctaccacttctgggagcaggatcccagaaggggagtgttttccagctgagaactttgtccagttggtgatttagtcggaagaagactggcttacttcatctttgccagagacccaaagactgtttagctgctgttttctaaataatatgtaatctcttttctttcttttttttttttttttttttttttctgagacagagtcgcactctgtcaaagaggctggagtgcagtgacgtgatcttggctcactgcaaccttcgcctcccaggttcaagcaattctcctgcctcagcctcccacatagctgtgattacaggcacccatcacgacacccagctaatttttgtactttagtagagacggggtttcgccatgttggccaggctggtctcaaactcctgacctcaggtgatccgcctgcctcagcctcccaaagcgctaggattacaggcgtgagccaccatgcccagcctagctgctgttttctaaataacctataatctcttttcaaaaagtcaaatttgtacctcaatttttccctagtgaaattttccaactgggcagtcactttaaaacattgctaggtttctttctctgcagttacgttctgtgttaatttcccatagaaaaaagaccgtttttctcatcaacgtttcctctttacctgagccaaccttgtccatgtacatgtacaaattttatagaattttgatcatagcatgggtatatattcatattctgcctttctcacttaatattatgattcttattattaccataagcattttcctatattggtaatattcttcacaatttttatttctggccagagaattgaagtttgcagtttaaattgatggatggtgggagcaaagaatgtttgatgttttctgtaatactaaaagtcaatcagaatacatctacattccacatagatccctttcacccaccgcttcccaggtatttcttacaaatgctgtgatctgccacatctaacaagttacttgcaaagcaggaatggtgctcggagcactctccctgtgttttgaagtctgattattgctcagatgcaatcattctgtggctgaggcttacaggaagggcccggtcaatagtgatgatgcatttactgacagtcactcagtcgaggggagtcggggtgccttaactgtctgcatacttcaggccttaatccagtggaatccagaaacattagtagggtgcagtaagttctgctagttgcaagagacagcaactcacactgtcacaggaaaagggaggaagcccttgggaataatgcaacaggcattccagctatatgccacacagccctgctcctggatcacagggagagccgccaagctggccccaggaacagcggagccagagtctcacccagcccaggagtgacaggcacctgaccgcaccagctcccacctgcttccccttcctgaagttttatttatttgtgcatttccttgttgcttatctctgggtctcattagagtgacagctccatgaggatagggctttgcattgtggctctctgcccagtgcctggcacacaacaggtgggacatagtgaatgactgaaggagtcaatggacccaaattcccgccactcccactgagtcctcagcagcggagttcaccaagggttgcactggtgactctcagagctttgtccctggtccaggtctcactcctgagtgccagcttgcatatctgactgccgcctggactttcccactgggatggctggtgggcacccacctgatgtgtccggcagaagccgtcttcttactgcctgccttcttttggcgggtagcatcacctcccaccttactgctcatgttctgagctttttgtttttcttgagatggggtcttgctctatcacctgggctcaagtgcaatggtgtgatctccgcacactgcaacctctgccttctgggttcaagcgattctcgtgcctcagcctcccaagtagctgggattacaggcgtgcgccaccacacctggctaatttttgtatttttagtagagatgagttttcaccatgttggccgggctggtctcgaactcctgacctcagatgatccgcccccctcagcctccaaaagtgctgggattacaggcgtgagcaccatgcctggcctgtgttctgagcattttgtcaccaactctggccatccaacctctaggatgtctcaattccagccacttgccttcacccaaactcctgccctacagtctgcagttcacggtggcatgagtctaagtgcttacagggcggccagactcttcctggctaatcgccaccgacccctctggattaacctgttgagacgccacttcctgacagagaggtcttcctggcctccccagctggtttaggggacccttcccatgcacacacacaccctggccggggaccctgccattcacttcatcataattccttggtaactgtttggccgagagactggttcagtgcggttttgtccctatttcctttatatccaccccagtgcctgccatgtggcagaaactccataaatattgctaaatgaatgcagaaattaatgaatcaaattatttcttcaaaatgctgagtgtttttttggtctcaggctcctactgttcccactgaaccaccctcccgaggttgaagcttcccagtgagggcgagcactgcagagcactaagacaagtcaattgcaggagaacagaatgtatcttttattgagttgtagcagtttaatagctgtctgaactctcattttactttgttgtcattctataaagatttacatgcctgcatggacatttatacagcacttagcattcggagttgcccaaaccagcacatgtgcatctgaggacttcggctctggggccggcccttggtgtctgggatctgtgtttggtttaccagacgtcccgccggcgccccaagcccagcacacagggtaggatctccctccaccccagcttatcccccaccatccccacccgccccacttctcccttggtgttctggctcctccctcttcttcatcttccaccttctataatttccttcacattaaagacacaaaggccaggcatggtggttcacgcctgtaaccccagcactttgggaggccgaagcaggcagatcacctgagatcacgactttgcaactagcctggccacatggtgaaacctcgtctctactaaaaaaatacaagacattaggtgggcgtggtggtgggcacctgtaatcccagctacttgggaggctgtggcaggacagtcggttgaacccaagaggtggaggttgcagtgagccgagattgtactactgcactccagcctgggtgacagagcaagactgtctaaaaaataaataaaattaaaaaaaaaagacaccaaataagcatttagcaatacagtagcattgaaccctcatggtcctcatgtacctctgagtaggtttggtagttcataccttggtgtttgttcttttcatttgccaccagatcgcttcttatttcttagtcagtttcgcgagtactatcagacttgtcttcctgggtattactcgggtcaatgcctgagaccccagcacccctcatgccccacaccacacccccagggcatcaagaaccaggctgagccccagggatacaacagccagctcagttcctgccctcagactatagaggctggtgggaatatgggcattaaaaagtaattgcgaccgggtgcagtggctcacacctgtaatcccagcactttgggaggctgaggtagctgaattacctgaattacttgagcccaggggttgaagaccagcctgggcaacacggtaaaaccccgtctctacaaaagatacaaaagttagctgggcatggtggcgttcgcctgtagtcccagctgctcaggaggctgcggtgggtggatcacctgagcccaggagatcaaggctgcagtgagccaagatcacgccactgcacttcagcctgggtgacagagtgggaccctgtcaaattaaaaaaaaaaaaaaattagaaaaaagaagaagaaaaagtaattgcacaaataactgaattttaggtgcgataagcaaagcccactgggcaatgagagtatagaataaggtgaatcaagcaggacagaggcagctgccctcaggtggcaccaactggggccaggagaagaagccacaggaagcagttttctgaccagagaaagcagcagcagggaggagctgggacaggaaggagaccagcaggtggggagaatgtcgggtcaatggggcttagtgagcagaagaggaaaaggacccagcagcagccaagccctgcagcagccagacggagacactgaagtagtcagaggggctgtgaataatgactctggggatcgggcgcagtggcttactcctataatcactgtactttgggaggctgaggcaggagaggtatttgaggccaggagttcgagaccagcctgggcaacatagcaaaaccccccatctctttaaaaaaaaaaaaaaaaaaaaagatgaacaagtaaaatatgcagcctctgtctctagttcaagaccagcctggcaacatagcaagaccctcccatctctttaagaaaaaaataaacaagtaaaataggcagcttctgtcccttactgtaatgaaatgagaaatgtctctgctcttaaaatgtaatgtgaccctctcaggtagctgggaatattctggaatgaccgcttctaacaggctcttgcatagctggaattttactgagttctaagcaaaattatgacagtatgcataattcgtcagtaattaaccttgtgtgggtgacttgctcttgcttcttgatacttttcatttttttttttttttacaatgagtatgtatttatttctacaatggtggagaacataaattagtaaaatattcaacttgcaatcttagtttctgaataggccttattaatgtattgcagataagaacttagtcaactagttgtagggtaaaacacaagtgtgacttctctgttccagaaacatcttagtaatgtttttgggggtttttgtttgttttttattttttagcagcggggtctctgttgcccaacctggagtgcactggtaccatcatagctcatttaaccgcctcctggctcaagtgatccccctgcctcagcctcctgagtagcaggaactacaggcacacgccaccacacctggctaatttttaaattttttgtagagatggggtcttgccatgttgccaaggctggtctcaaactcctaggctcaagcaatcctcccgcctcggcctcccaaagtgctgagattacaggcgtgagccaccacacccagcctagtaatggtgtattttaaagagttcctaggtagaagaaaaagactaggcactccagaacttctgtgctttggttgcaaagttcactggaagcatctctttgcaagttgtccttgcctctgtctgtgacctgctatcagaaccgtattttactgcttgctgagatgcagtttagttcctacagacacaaacccttcaaatataaaggcagtgcctggaagggtttattttaagatttaaatcttaggaagcacattaccagtgatataaaatattcattgactcatgaaacactgctagaagtcgctgtttcgtgactgactcgtctccctttatttccataggttaactggtctgcctttgtgaaaagtagatgtaggtttttcggaagtcctaaaagagagctggctggaaagagtgcatttgtaggccattccattttcagagcctgctcccaaatgcctgtgctctgaggtcctccccctgggagaggtttcattttggatgtaggaaaaccatctctcctggtgactatccttgtcggcctagcatctgagaatctagaaataaaatggaatgtcatcatttttgagaactgctttttaatgctcctccaggagaataaaatagcagtctggttcttggtgcctgctactttcaagtgaggacacattacaggttaaaattagaaaacactgttcttttatacttctttctccactgcctgcccctcactcaaagatcccacattaagactcctggaaaaaaagttgaagaaatcagcctggcgtggtgactcacgcctataatgccagcactttgggaggccgaggcaggcggatcacctgaggtcaggagttcaagaccagtgtgacaaacatggtgaaaccccgtctctactaaaaatagaaaaattggccgagcatggtggcgtgcacctataatctcagctactcgggatgctgagtcacgagaatcgcttgaacctgggaggcggaggtggcagtgagcctagatcatgccactgcactttagcctgggcaacagagtgagactctgtctcaaaaaaaaaaaaatgacaaaatcttatgatttcgttagaaatagcccctggttttcatgccaagaagttcatcaatgtgccacttggtagccttctcgaaggtgatagaaatgtggccattgcagcctgattctgtacggtgactccagtccacgtattccaggtctccaggtgttggcaaacaagacctgggacccagggcccctccggagagctccctgtaacttcagtagcaggagacatgcgggatccctttacaaatcctcagtttgccttcataaaacattttcattcatgtgattaagaagtaatcacaggccccaaacaaaacaggacagaaagaggaactgggtctggaagaataaagccctgtgggtggcggataatgtgctgactcctgtccaggatacaggtccctggccctaagctggtcctgaaacagcctcgggggacgaggctgtatgctctgtcccagttacactcaggctccggcattagggaaattggaaaccaggcatggaagcagcgtccctaccttcctcggccaggttcataaacctggggctcaatccgcctctccatgtaggacactgtatgtttgcaggctgaggaattggccaccactgttctaaagacaagcaggcatgacaagatgggcgttaggcctgttgccgccaggttttgccggctgccgtccttcccaaggctttcccttctccatccatcctcccccggtccctcgacacagcactagagtgagaacaccctggatgtgacttggggactcctcctcggtgtgcttgcgtggagagtggagaggtgcgtcgtttgtgccccgctttgccatgaccggggtggtcctggcacgccgggtatctagacagcttttcatcagtcgctcatcagcatgctaattgccgtatgactaattatgccctgaattccagttgattttcttaatgagacagctgggttaattatgtaatcgtatgattacattagcctagagtgccctggcgaaaagtagcgtctgccgcattgtgatgtcatcgcggggacggtgctcacaagggggacattcatcctcaggctggtggcaggggacagcccccatcgcccgcagagcgcactgtgcaaacatgagcctcatgtctattaagattggctttttcagccctcacaacctacaagaaaagcagttcaccaccagcagtctcctcgccaccctgcgccctctccacgcccccagccgaatccaaaagccgcctgcaggcctctgcagctcttctgagatccagccatgtgtcctttcttctcacaggacctctctgcaccgaggctgttgggctttatcagggcacaccagcacttccttcagagtgatccgaagaactcaaagcaaaatgtttgcattaaagtcccagagcgacttagttgacgataacatataaacaagccctagactggccccgaccttagatcccactgcgcacgccagatatgctgtttcattccttctttctgcccaatctctaacacacatcatatttactaggaaaatacatgaccgataccttctggtttctggccacttcgctactccccatcacagcagaactcccctgggaggtgactgcctgctgaatcacttcttcacctatttacactcttcctccttagacttttgtggccttctcctcttcctctgccagggctctaaatgttggagtatgccaggacgttattcttagccttttccttttcatttgcattccctccctatctaaaactccacatgaccaaaagagaatgatcatttccccccacgtgctcccaagatagtcagtgacatcaccattcacgcaggtgctttggccactgatatggtttggctctgtgtccccacccaaatctcacctcaaattgtaatctccacatgtcgagggaggtgattggatcatgggggcagtttccccgtggctgttttcatgatagtgagtgagttctcacgagatccgatggttttataagtgtttggcagttccaccttcgctcatctctctcctgccactttgtgaagaaggtgcttgcttctccttcaccttccgccacaactgtttcctgaggcctccccagccatgtggaactgtgattccattaaacccctttgctttataaattacgcagtctcaggtatttcttttttgttttttttgagatggagtctcaccatcgcccaagctggagtgcagtggcataatcttggctcgctgcaacctcctcctcctgggttcaagcgattctcctccctcagcctccctgggattacaggcgcctgccaccatgcccaattaatttttgtatttctagtagagacagagtttcaccgtgttggccaagctgatctcgatctcctgacctcgggtgatgcgtccgcctccgcctcccaaagtgttgggattagaggcatgagccaccatgcctggcccaggtatttctttatagcagtgtgaaaatggactcatacagccataatgcacaactcagcctgggttcccttctttctttcacacccaatagccaggctgtcagtaagtcctagtgagccagcagcctccagaatgtatcccagattcgcccacttacccttcagccactgtcacctagtccaagccaccagtctctgtcacctcactgcactcacacctccacctaacgtcctttgcacagcaggcagacgggtctacgtcagtggtctccaaactacttttgcttatgcaccccaagagtaaaaaagtttgaattgggccaggcacggtggctcacgcctgtaatcccaccactttgggaggctgagggcaggcggatcacctgaggtcaggagttcgagaccagcctggccaacatggtgaaaccccgtctctactaaaaatacaaaaattagctggtgtaatggcaggcgcctgtaatcccagctactcaggaggctgacgcaggagaattacttgaacccaggaggtacagtgagccaagatcgcgccactgcactccagcctgggcaacagagcgagactgtctaaaaataaatacatacataaacacatacaatgaaatgcgctcatttcaagtgtgcagtgtgatagcgtggccaccttcacagtcaagatgtagaacatttctatcacctcaaaagttcccttctgatcccagtacccagcaactgctgttctgctctttgtcacttctggagttgtatagaagtggaatcatttggtctgtggtcctacatctggcctctttcactcagcgcggtgttttgggattcatctaagttactggtgtcattagtcctttcctttttattgatgaatgatattccactgtgtggatatataccaatttgtttatccaacagttatgttgacagacatttggttggttgtgggtattatgaatcagtctataaacattcatggagaagttgttacataggtatatgtttttatttcccttaggcaaatacttaggatgagggtcagggaacctgtacattttacctgataagaaatgccaagctgcttttcaatgtagatgtatctttttttattaatttttttcattttcttttcctcaggatagcaaagttacagttgtattattttatcccctcataagaaattgagaggagttccagttgctccatgtcttctgtttcatcggttattttctaattttagacattcctagtgaatgcgtaatgtatttcacaacgattttagtttgcattttcctgatgattaatgatgcagaatattttttcatgtgcatttttgctttcatagatttttatttataaaggtttcaatcccttgcacatttgaattttggagacagggtcttgctctgttgcccaggctggagtgtagtgatatagtcatagctcactacagcctcagtcttccaggctcaagcgatcctcccacctcagtctctcgagtagctgggactacaggcatgtgccaccacacccgattaattttttgttttttctagacatgaggtctagctgtgttgcccagactggtctcaaactcctgggctcaagcagtcctcccaccttggcctcacgaagtgctgggattatgggcatgagccaccgtgcctggcttctgtatacgttttagattcagcttgtcagtttttacaaaggagttttctgtgattttgattaggattccactgtatttgtagatcaatttgaggaaaattgacaacactatttattcttccataatatatttatttagttcatctttaatttctctgagcagtattttacagttttgatgtataaacctggcacagattatgttcagtttatttctaagtttaagtcatgtttttgaatgttatattaaaggatattttcttttttaaaaaatctacaatgtttattttattattattatttttaatctcgcttcatcaccaaggctggagtaaagtgacgcgatctcagctcagtgcaaccaccgcctcccagattcaagcaattctcctgtctcagcctcccaaatagctgggactacaggtgcctgccaccacacccagctaatttttgtatttttagtagagacagagtttcaccatgttggccaggctggtcccaaactcctgacttcaagtgatctgcccacctcagcctcccaaagtgctaggattacaggtgcgagattaaagtttattttcttttgaaatttgttttccaattgtttgttgcttttatacagaaatataatgaatttcatatattatataatttttacattttaacaaataataaaatatataaatatatattttatattatgtaatgtttatataataataatataggtgacctcttaatgctcacctattagctctagaaatttttttgaagttttcttgaattgtccatatgcccttgaagacaatatatacttttttcttttttttttttttgagacagagtctcgctctgtcaccctggctggagtgcagtggcacaatcttggctcagtgcaacctccgccttctgggtttaagcaattccctgcctcagcctcccaagtagctgggattacaggtgcccgccaccacgcctggctaatttttttggatttttagtggagacggggtttcagcatcttggccaggctggtcttgaactcctgacctcgtgatctacccgccttggcctcccaaagtactgggattacaggtgtgagccaacgcacccggccacaatatatactttattgatgttggatggaatgttctgtaaacatcagttaggtcaagttggttgatagtgttgttcatgtttcctgtatccatcctgatttctgatctataatgctgtatatttattttccttgcttttttttttttttttttttttttggcacttgctacctgtataaaatgttgactagaagtagagaaagcagacatccttgccttggacccaacattagggaaaagcattcagactttgataattaagtataatatcaactgtagatttttttgtagttgccgtttataagatggaaattctctcctattcctagcttgcggagaatttttgtcataaatggtattgaattttctcatattgttttcggcatctttcgagatgatcatatgattttcctcctttattctcttaacatggtaaaataatttgattctcaaatgttaaacaaatcttgcattcctaggataaatcttacttagccatgcattttatgcataatatgcattttataatatattttgtgcattttaaaatttgctggattcaatttgctactgttttactgaggacttttgccgttaaatttatgaggaacgatatggtttggctgtgttcccatgctatctcatcttgaattgtagttcccataaaacccacatgtcgtgggagggaccagtgggaggtaattgaatcatgggggtggttatccccatgctgttcttgggatagtgagtgagttctcacaagatctgatggttttataaggagcttttcccgctttgcttgtcactccttcctgctgccatgtgaggaaggacatgtttgcttccccttctgccatgactgtaagtttcctgaggtctcctcagccacgctcaactgtgagtcaagtaaacctctttcctttacaaattacccagtctagggtatgtctttattagcagtatgagagcagactaatacagaaatatacaactatagttttctggtttttttcctttgaatatccatatagggttttcactttaaggttgcactggtcttgtaaaataagttagaaagtgctccccctttcctctatttgctgaaagagtttgtataagattgcagttattttttcgtaaaattcaattcatcagtgttgccatccaggcctggaattttctttatggcaagtttttaaattacaaattaacttctttaacagatgcaaggctattaagttttttaaatttcttcttgagtcagttttggtaatttggaatttttaaaggaatgatccatttcatctaaattatcaaatttgttggcataatattgtacataatattttattaacttttaaatatctgtaggatgtgtagtgatgtcctttcttatacttcctgacattagaatttgtgaatcctccccccgggcttttttccttgattagtctggctagaggcttatcaattttaaagttatttaaaaatagaaccagcttttgtttgcattgatttttctcttttttttttttttccttgttttcagttttgttgctttctgttcttattagctactttctacttactttgggtttaatttgctcttctttatgagttttactaagtgggcattgttttatttcattgtggtcagagtacatgtttgtatgatttctgttcttttgaatttatcaaaagttgttttctcatcctgtacatcgatgaatgttccatgtgtacttaaagagaatgtgtattctgtagttgtttgaatggcatgttctagaaaagtgagctctgtttagttagtggtgttcttcaagtctcttatatccatattgactatataaaaatcataatattaattaatgtgaatggcttttttcgttgtttttttttttgagacagagtctcgctctgtcgcccagagttgagtgcagtgacacgactttggctcactgcaacctctgcctcccgggtttatgcaattctcctgaatgtggatggcgttttgaaatctaattattattttggatttttcttttttctttcagttctgtcagtttttgatttgcatagtttaaagctttgttttggggcaaatatacctttaagattattatatcgtctctcaattgtttgattcttttaagtttatacaatgaccttcattattcctggaaatattccatatcgtaaagtattctttttctgattttaatataagcactctggctttcttttgatgagagtttttatgttatatatttttctatacttttactattaacctgtctgtatctttatgtttaagttatgtaaatacctacatcttgcttttttatccatcctatctgcctcttaactggaatgttagatcatttacatttaatgcaattatggataaagttggattgaagtctaccatcttactttttctatttgtcttgcctgttttttcttgtatttttcctgcttttgattaactgatttttttaatgtttttatctccccaattatcttattagctataactcttattttcttaagggttactttaaagtgaaaagtaagccagccatgatggctcacacctgtaatcccagcactttgggaggccaaggcaggcagatcacctgaggtcagcagttttagaccagcctgaccaacatggagaaaccctatctctactaaaaatacaaaattagctgggcgtggtggcacatgcctgtaatcctagctactcaggaggctgaggcaggaaaatctctcgaacccgggagacaaaggttgcggcgagctgagttcgtgccgttgcattccagcctgggcaacaagagcaaaactccatctcaaaaaaaaagtgaaaagtaaccatctttaacttatcattttataccttcaaataatacaccatttcacatacaatataagaatcttataatacattgtcactttctcactcttgttcttttgtgcatttttactgattttacttctacctatactacaacgctataatacatggttactattttttctttaaaccattaacttttaaagaaattaaaaatgaaattataatattttatttttactcatctatttaccatttccagtgttgtttattcccttgcgtggattcaagtatgcacgtgaaatcattttcttttggtctatagatctccttttaacatttattatgatataggcacactggcaatgaattctgttagctttcattcatctggggaaaaaataccttaatctcacccttttttttttttttaagacagagtcttgctctgtcacccaggctggagtgcagtggtgcaatcttggctcactgcaacctccatctcccaggttcaagtgattctgctgactcagcctccccagtaactgggattacaggtgtgtgccaccatgcctggctaatttttgtatttttagtagagacggggtttctccatgttggccaggctggtttcaaactcctgacctcaggtgatctgcctgccttggcttcccaaagtgctgggattacaagcgtgagccaccgcgtccagccaccttcatttttaaagagtattttttgtcagatataaaatagtttcttgggtctgccagtcatggtggcttatgcctgtaatcccaacactttgggaggctgaggcgggcagatcgcttgaggtctggagctggagaccagcctggccaatatggttaaagccctgtctctactagaaaaacaagaattagctgggtgtgatggtgcacacctgtaatcccagctactcgggaggctgaggcaggagattctcttgaatccagtaagcagaggttgcagtgagctgagatcgtgccgctgcactccagcctgggtgacagagcaagactctatctcaaaagagaaataaaataaataaaatgaaatagtttgttggtggtttgggttctggttttttctctctctggactgactgtttctgagacaggcgatctccagtaattcatatatatttttttaacctatatacaattaatctttttctcttcaccatttaagattttccttttctaattttgatttcagaaactctcttacgcttactggtgttctttgggtttatcctgcatggagtttgtagagtttcttgaatttttaggtttatagcttttatgaagtttggaacattttgccactgtttcttcaaatacaccctttccctctttctgggaaatgtatgtttggttgcttaattttgtttcataggttgccgagggtttactaactttttttttcaatctttctgtgtatttctgtttggtttgtttctgtgactatatctttaaattcactgatctttttctttcactgtgtctaatctattgttcagccaatcaagtgaattttttccatttcacatactttaagcttcagaattcgatttgattctttatgttttctgttcctctctgtattgtattcatatttttctttaaatccttggacatgctgataatagatgttctagtctgcttcttccattatctcttgtcatttctggttctgtttttatgaagtgatttttcccctgatcatcctgctgctttgcatgtctagtaatttcctattgaattttagacatcatgagctttaactggattttgttgtcttatttaagtttgggcaggcagttaagttacttgcaggtcagtttgatcatcctgagacttgtttgtagctttttggagtggatatgggcaagccttgaagatgagtttagccctccactcaggtgggacacttccagtgtctttactcttcaacaagtccttgctcttcaacaagtgtgtcctctctggctggttgcagttggaaagtcctccagccctcaaactgtgggaggttttcagctcagactttcctttctattcttgcctggccttaggagtttcaccctgtgcataggcactttagctcttggcaaaagatcgcctctctgcagatttctgtagctcttgtccctccttttcacactctgccttgcaaattccaattgctgcagccacccaatcttgtgatgtgtgtccttcaatggacagggagaccatcacactccgcttgggtttttttcttcattgtgatgcaatccagagagttcttcctgccaggaagggtaacatagagctcatctcatttgcttcccttccttcagggaagtcttgttccaccagttgtccagcgtctgtaaatagttgtttcattgactttgcctagttttctagttgtttatgaccagagcacaagttgagtatcagtagatctgtcatggccagaagcagagactccaagttctgttaattttgatttttggttttcatggaaatggctggaaaaaataacttacaaagataaatagattcaaaccaaagaaacacattattggctatctttacaaaaataggattcatatttatgaaatctaggtataggttgagtgtcttttatccaaaatgcttggaatcagagtgttttggatttgggatttttgaattagggatattcagcttgtactaattatgagaaggtatttgttgaaactcagctagtcaattttcattttccatgataccgtttttttttttgtttttttgttttgttttgttttttttgagatggagtctcgctctgtcacccaggctggagtgcagtggcgcaatctcagctcactgcaagctccacctcccaggttcatgccattctcctgcctcagcctcccgagtagctgggactacaggagcccgccaccacgcccagctaatatttctgtattttcagtagaaacaaggtttcactgtgttagccaggacggtctcgatctcctgacctcatgatccaccacctcagcctcccaaagtgctgggattacaggcgtgagccaccgcaccccgcctctttttttttttttttcctagcttttcagaagatcctgcatttcttatattaattaacaaacgatttgaaacttcttttggcaaatgtttactcagatttgagttggtaaataatagtagataacatttattgagtgttaactctgtgtatggcaattttcttaagttaatcctcacggcagcaccatgacatatgcacagttagtatgcccaatttatgcatgaagaaactaaggcacagaggggttaagtaacttgtccaagattgcacaaccaataaatgagagagctgagacttgaacacatgcagcctggctcatactgcagaccattacactacactccctcttgtgtgatataaggcattgaaccatttttgtaaaaggtgctgtctttgcccatcagtatatagatgatggaaacatttccaaatattcacttttagaatgctgtcactgtagcataaaatagttattttcctcaacaagcattaaagcaccacatttattgcaacaacttagagtatgtgtttattttttcaaaagtatctgtcaagcggcatgttactgatatgatagccatttaccatcacaaaacagggcaggtaatttggatcccttagcttgctttttttttcttttctttttttctctctgttttgaggacagggtctcgctctgttgctgaggctggagtacagtggcatgatcatagttcactgcagcctctaactcctggcctcaagcaatcctcccacctcagcctccctagtaactgggactacaggtgtgttcccaccatgcccagctaattttttatcttttatttgctgagacgaggtcttgctatgctgccccagctggtcttgaactgctggcctcaagtgatcctcccacctcagcctcccaaagcactgggattacaggcacgcaccaccccacccggccaggatcacttagcttttctaaagaaaattatatagctcatctttaagcttaaaactcttacatgcttttgccaagagaaaaccaacaaaccattgtgtgggttgaagtactacagttttggtttggtttggtttggtttgaaatggagtcttgctctatcacccaggctggagtgtagtggtgtgacctcggctcactgcaacctccacctcccaggctcaagcaattctcctgcctcagcctcccaaatagctgggactacaggtacgtgccactacacccagctaatttttgtatttttcctggggacagagtttcaccgtattggccaggctggtctcaaactcctgacctcaggtgatccacctgccttggcctcccaaagtgctgggattacaggcgtgcgccatgccgtccatctctggccacttcttgacaggaaaagaattgcatccaaaatctgaccattggctcatttcagacattgtactttcagctctagcatttagtttgcttctttttatatcttctttttctctcctccttgcactcctatttttcttaaaatccttgtgcacaggctccctctcccagatctcttttcccttcctgttctgcctctccttccctgggaccacactggcttctcactatgccttgaccatgccctgttcacagctaccacgggacctttcactgggcgctgcctctgactggggtgaatccttgcgctgcctggcattaccatccagatcttcatccccactcacttcttcagaggccttccctgtccccttgtctctaggacccatttccctcactccctgtgcctctcctctccatgctcagcagcgcaaacgctcctcactcacagtggggctgtgccccagtcaacccatcacaagtggaaaatatcataagtcaaaaatatattcaatacccctaacctaccaaacatcataagttgaaaatatcatgagtcaaaaatgcatttaggccgggtgtggtggctcatgcctgtaatcccagcgcttggggaggccaaggtgagcagattgcttgaggccgggggttgaagaccagcctgggcaatggggtgtgaatccctatctatactaaaaatacaaaattatcctggcatggtcgtgtgcgcctgcaatctcagatacttgggaggctgaggcaggagaattgcttgaacacgggaggcagaggatgtagtgagccaagatagcgccactgcactcccgtctgggtgacacagtgagactccgtctcaaaaaaaaaaaaaaaaaaaagaaagaaagaaaagaaaaaaagagctccttttcccggtttctccaggagcgctcttccactcatctggtctcctgccttgcgtttgtcatttacatgcatggcttatctctgctatgaggctgagcctttcccagagcagctagttggttccgttgcttaggaaatatttgttaaattagtactgaaagagattttctttggctgctggttaagaaaacagaagcttttttttttttttttctgagacagggtctcactctgtccctcaggctggagtgagaccctatctctttaaaaaaaaaaaaaaaaaaagaaagtcatagctctctgcaacctccacctcccaggctcaagcaatcctcctaccttagcctcccaaggagctgggactacaggcatgcaccaccatgcccggctaatttttgtattttttccagagacagggtctcacttatgttgtccaggctggcctcaaactcctgggctcaaacaatgttccctcctcggcctcccaaagtgctgagattacaggtgtgagccactgtgcctggccagtaagcagaaatcatactgagaatttttcaaagtcgtttgcctggcgggcttctttcctttttctttccctccctgggtgagatgcatccaccccatacattgcagagcgggctccgccagcctctgactgtaatggctggaattaacgagataatattgcgtgcacttaggaaaaggtgctgaatatgtacagtattgttgtttgtaataattatgttccttgagccctgtgttgcataacaagctatataatacctccaagattgctttaggaattaagtatcagatgattgtaaaacactttacaagattgtcgcattgggtgggcggagctggcaggaaagcgtgttgaatcggaggaggaggaggctgggaagacaggggttaccggattttgtgtgttcctgttttatatatgggtgtgtcctcttcgcctcctccagacaattccctaattgagctgctaagatcggaggcatctgacgttcgcataagacctgacaatccttgtgtggggtttaaatggcattggaaatcattaacaagacaaaaagctattatttccgtagattaacacacaggttgggttttggcacgccaaaattcattgttttggtctttagcccaaacatgctagagtcattatattgtcatgcagtaattagctgttcctttaatacaagtaataaaaattaagcctaagaagttctttagcaatgcctcttacatatcccaaaacaatattcaaatgctgtaggcatttagccattcaactgtgctgtagtaaagtttggagtttaatgcacagagatgtttgaacatttagctcatcctttagtctgtgaccagctttgctacataggcattaacctttaatagtgtcagactaaatatacatgccatgatgaatgattatgagattgcctgaattttcatttacagtataaggctctgaaaattggtgtaaaggtctggttcctcctcacttgataatgtgcgtgtcattttcatatgtcaccggattccttgcttaaccgcatgggagaagctattttttaattcgaagcagatacagtggggtcctggccttttgaaaagaatgaactggaaatgttgacagaacttttagggagggcaggcagtatactaggtgtgttctttaaagatataatttgctggcacttgtgctagaaagcctacgtgagcaactcttaatagaattttatacgtgatcaaaggttcctctctttacctcctcttccctgacctctatgtcaagtttaaatcgtggttctgtacaaaggaggctgtgaacgggctgttcactttcttgaaaccatttgcccagcacaaggtcgtgaaggtggggaagaggggcaggctgagaaggtgaaggtatccagagaagttatggaaattttttttacaaacagcacctggaatcttttcaggaattctgtttttttgtgttatcacgactcctgcttacaaagaaccatctccccaagatagcatttttttttttttccaagacaggatttcgctctgttgccccggctggagtgcagtggctcaatcacagctcaatgcaacctcgacctcaagggctcaaggacttctcatgccttaagccccccagtagctgggactacaggggtatgccaccatgcctggctagttttttggtttgtgtttttgttttgtagagacaggctttcaccatgttgcccaggctggtctcgaactcctgagctcaagcaatccggccaccctcggcctcccaaagtgctgggattacaggcatgagccactgcagccggcctccaaaatagcttttggagtcaaatttaacataaatattttgatgctgattaaaataataatgaaaagccatgcaccagaaagagatgcaattataggctgtgtatacgtgcagagtaagtgcccagcagccagggattctgcatgatggactgtgttgctgtgaaaccccagcacccgggatctgctgacgttgagcccaacatatcccagcgcctgccttttgtaaactctgcaaagacgctggcatcctaaagagtccctggctcctgctggatacgttaaccgaggcatggtagacctggccctcgattccaggaacctagggtggtctgaaaaattaatgactctggcatttgaaaattaagtgagctcttgaatatatactcttgttgatccgctgggcatggtgtttggcattcttcgactggagactaaatctctgcagccatctcacaagtgacactggcgcccataccagaaatatattcaataatctttctaagccctgtggacttgggtattcttccactctgacggagcctgagaattccaaaggaagtatgccccaggtacccagcaggcggaatataattgcctcttaggcagcagaaagaaaactaaagatcacattgatgcggaagaacatttaaggtctctctatcctgtgttgaattcacagtaaaggcgagagccgtgagtttgtactgtaaattccaggtctgtgacttctgactttggattaaaatccagttttctggaagtgaatctgatggcagatatgaccttgaattggctgcaagaccccagcgctggcctggctgccgtgcagcgcgcgctgctctgcacttagttatcatcaggagtgtggtggcctcctggccagctggtctacgacagggccatgccgggtcaccagctgtgcctctgcaggggtctccagccttgggacctgcggccgctaacccctgactcttctgaacacccttcattagtgaaggaggatcgtaatggaaagtggtcatgtcatgaaatggggtggctttataaagcctaagtgtttctttcctctgcttcacctctgcttcattctttaccttgttgtaaagaatggtcactcagggctgggtggggtggctcacgcctgtaatcctttgggaggctgaggcggtcagatcccttgagtccagtttgagactggcctaggcaacataggaagaccctatctttaccaaaaaatacaaaaattagcccagcgtgcttgtgcatgcctgtagtcccagctacttgggaggctgaggtgggaggattgcttgagcccaggaggtggaggctgcagtgagccatgatcatgccactgcactccagcctgggcgacagagtgagaccctgtcttaaacaaacaaacaaacaaaaaagcatgatcacttggagttaacagacttaggtgtgcattctccatgccaaccaactagctgggtgacctcaggtgagtcattctgcttccctgggctttagtttctgaggcctctttctcgagattgttgtaaggctcaaaagacacaatctccataaagtgtcccgtgaactgtgtggcgttctcaggcatcaggtgtcacttccagcctcataatcactggacccttaaacatcccggcacctgtccacggacttgtccgtcctccacgtgcagctccggggatgtgattgacctcctggggctgctacctggtgtatttctctacttatctgatcaaagaatgaaaatcatgaaagtgtcacaccaggcaggagtaatcggcaaataccagtgaatctcatggctattgccaccccattttcacacctcgaggaccccgggctgggtccatcctttgtaaagcactggagaattctcccacccagcaagggggctggctgcaggggcatgactgtggcctctggggagcccccggagctgatgtcccaggagccccactctgagcctgtgtaccgccgtggagggggcctgtttgctggccgagtggggtgatggctgttttcctgttgtgcagatcccgtaccagctttggatctcggacagcaactccagctcaaagtgcagcgcctgcacgatattgaaacagagaaccagaaacttagggaaactctggaagaatacaacaaggaatttgctgaagtgaaaaatcaaggttggtggaaaatgcgttctttgctttttcttttcttcttttttttctcttctttttattttaattggcttttcccatacttttgagaccagctctccttgtaatatacacgtcataaagtcagggtggggcaggaatctgagtcgttaaagagagatgataatcatgctgagctatttcgaagtaaaacttttcctctgcacaacaacgacgtaagattttattgccctctgatgagaccgatcaggattctttgaaaattcttcccgtatcattacgtgattgggtctgcctcttgaaaggcccatgcattgcctccaggcgacacctgtcagagagccagctcatgatcaaagggtcacacacagtaagtcatttaataattgctgtggatacattaaggcttcagacacatcttaaaggctgcatgcttaagccccgctgttgccttgtcagtatcgcctattcattaggaatttaatgaaagaaaacaacctcttggtgtgtttgcccagccgtcaacaagacagagagggcaaaggttgcctggcttttcccgtcagggaagaacaaaggaatctctcctttacctaaaatccagaggcactcaggatccaggagcctgttggcttccttggcttgaaggaaaatcacagctcccgtctgacagcagcagcagcaggcttttcagccagctccaaagaataattcggccagtttgttttggtttgggaatgtgagtacggaattaaattgaaaggggaggctgcccattcctagtggccttccattgaccatttgtagagacttcaataaagagttaattggggccacgtgcggtggttcacacctgtaatcccagcgctttgagaggccaaggtgggaggactgcttgaggccagaagttcgagaccagcctcggaaacgtagcaatactctgtctctacagaacatcagaaattagctgggcatggtggtgcacacccgtggtcccagccactcaagaggctgaggcgggaggatcgcttgaacccaggaggtcaagcctgcagtgagccatgattgtgacactgcactcagtctgagtgacagagcaagatccagtctttaacaacaacagaaaaagttaattggcaaagacttcttttttttttttttgagatggagtctcgctctgtcgcccaggctggagtgcagtgcacgatctcggctcactgcaagctctgcctcccgggttcacgccattctcctgcctcagcctcccgaatagctgggactacaggagcccgccaccacgcccaactaattttttttttttttttttttttttttttttttaagtagagacgggatttcaccgtgttagccaggatggtctcgatctcctgacctcatgatccacccccctcagcctcccaaagtgctgggattacaggcgtgagccaccgcacccagccaattggcaaagactttctaaaagtgtcctttggctttaaaaacactgcagatagaccagggaagaagaattgtccatgggaatgatccagaaagcatctgtgatgatgtgtgaagagccagaggtagaggcatgggctgtgagggcggcggtgcctaagacctccgagcacacctccctgtagtgtgggcatgggggtactcaagccctcaggccagcatagcttccttgctgaaatttgggggcacgaggtgacaggcagctggggaagccagaccccgcttctttctggctttgcagagagtggtgagcctttaggactagaagggacaactctgtcctgctagagagcgaggcattgggcttactagggctggaactgctgtgagggaaggtattaccttcccttgtaggaagcatttcttgccagaatcacgccagtattgcagtaaaaggtaacctgcaaatctgcacattgagttttcatagatacgctaccctaaaggggagtatcctggttttttttttttttccccttcattgtcctctggtatctaattttgatagatccactctctggtttgtttggtgagtgttttttatttatttatttattttagattcagggtctcgccctgtcacccaggctggagtgcagttgcatgatcatagctcactgcaacaaccttgacctcctggactcaagtagtcctcccgcctcagcctcctgagtagctgggactacaggcatgtgtaccaccgtgcccagcctctttctggcttattttatttttttgagtttgcttttgttttgttggagggtggtgcaggtggggcctggtgggctgtgcaggattgtccttcccttctccttctatcactggtgcctaaattaccagcttcccagtggccagggctttgcacaggggctgaccaggagccaagctgggtgtggatgttctctccccaaagatctcatccacactcaggagtggcttttcacaatgagttatagagcccaagatttaagaacagctccaggccaggtgcagcgactcacgcctataatcccagcacttaaggaggccaaggtgggcagatcacttgaggtcatgagttcgagaccagcctggccaacatgacgaaaccccatctgtactaaaaatacaaaaattacaggcatggttgggcacgcctgtaatcccagctactcagaagactgaggtggaagaatgacttgaacctgggaggtggaggttgcagtgagctaagatcacaccactgtactccagtctgggcaacagagcgagactccatctctaaaaaagaatggctctggaggcagacagacagacctggtttgagtccttttattgctaccacctagctatgtgaccttgggcaaattatctcactttgctaaaagcctctttctcttgggaggcaattctgatacttaccaggtagggttggtgtgagcttaaatatgcatatacacacagcatttggcactcaatagtacctgctacttattcagcagtgtggtttttgaaagaaatttaccctcctttatttggataacaagttttcccaagctccagaaaaatgtcatttcctctcccccacttccaagaataaaagtgattataatttgggaaggtgggcggtgcacatcacttcttgtaattatcacaccagtagtgtaaatgattaaaaagttagagcaggggccagcacaatggctcatgcctataatcctagcactttgggagaccaagtcgggaggatctcttgaggccaggagttcgagaccagcctggacaacataacaagacctatctcttaaaaaaagaaaaaaaaaaagatggtgtgagtccattgtgtgttgctgtaaagaaataccttagtctgggtaattgatgaagaaaagaggtttatttgcctcatggttctgcaggctgtatgagcacgatgccagcctctgcccagcttctgagggtcctcaggaagcttttactcatggcagaaggtgaaagaggatcaggcatgccacaggacaagagaggagggggcatcccagacgtcttaaccaaatctcagtgactcatcaccagagagaggccaccaagccattcatgagggattcgcccccatgacccagacacctcccacttggccccacttccaacactggagatcagatttcaacctgagatttggaggagacaaacatctaaactatatcaggtacataataaaagttagagcaaagagggaacttctgcctcatgggccacagccccacccatcccgcaatgatgagtaaatggaggccccaggtaatgccaagccctttagattcctctctgttatgctggccccgtcctcccctacacatgcctgggaggcctgctgagacacccagcatctgcccgggatacagcctgggccagaaggccagaggcgctaggataaagtggcctctggctgaggttgggctggtccgtgagcactcacccgggtccagggggtggcaaagagacctcatcaggcacagcacactgtcgaggtcacacactgtgatgtgtcactgaggagccccactggagcaagcgttagcgtccaagtgctgtacagccacttccagccggtccttaaaggcaaaaatgaggccaggcatggtggctcatgcctgtaatcccagcactttaggaggccgaggtgagcagatcatttgaggtcaggagttcgagaccagcctcgccaacatggtgaaaccccgtctctacttaaaaaatacaagaattagccaggtgtgatggcacacgcctgtaatcccagctcttcgggagactgaggcacgagaattgtgtgaacctgggaggcagaggttgcagtgggccgagattgcgccactgcactccagcctgggtgacagagcgagtatctgtctcaataaaaaaaaaaaaaaagacaaaaatgctgtatgtttacacgagagtgtagaccattgacgtagcagagcagttcaggctttttcagagctgacctgtctggagtccattctggaagtgtccagctcttgcctcactttggcctcgtccgtatggcttgagagagacgtatcaccaaccactgtgtgcacagagcatttcttccaggacctgaacagccaaaccaaaaggcggaaagttgcccagtcccctctgctgtgccctgatgggatcgttggtggaattccacctctctacggaaagcactctgggacacacctcatgaaaaaggccaacctcttaacaaaagagcctttcacacaaaaattagccaggtgtggtgcgcgcctgtaatctcagctactcgggaggctgaggcaggagaattgcttgaacccaggaagcagaggttacagtgagccaagactgcaccactgcatgtcagtctgggccactgagcgagactccgcctcaaaaaaaaaaaaaaaaaaaaaaagcctttagcttgtatgcactaagccgcgtgggtgttaatcgcccaggtgttttgctcctgctctggccagcgcatgtccgtgcagctcagggagcaggaatggatgtgagttacacacctggcaggtgcccttgctgcaccagagggagctccattgccacaagccctgtctgggcttcccccagctctgcccggcctcggctccttcagtcattcatgccacagtgctttcctgagcacacgtctgtttgccagcactgggaacacaaagaaaatgagcctcgcctgctaagaggtagatctgtagcagcgggcgacaattcctaagagctcccctctcttgggggctggggccacagtgcttttccacaaagcatccagcatgcggagtggcataggcgtatctggaggagggcgcacgtggagttgtcctgccccagagccacccacacacaaagcatccagcatgcggagtggcataggcgtatctggaggagggcgcaggtgtagttgtcctgccccagagccacccacaggtctgttccattcatcaaatccgctttgatattccccatttgggcagttgaggtgatgtctgtgaacctgcagttggtggtaccagagccgtctggacctgcgctttcccaagacagccctgcctcccaaggggcccctcgctgccccacatccttggtgctcacacctcactctaggactcctccaggccacatgccagtcaccggagcatcttcccccaggctacggcaccctctgctctgcacacagcccatgaccaccagagtggtgggcactccagggtgggtcccttccagcccactccctccatgctttatccacctagcaccacatgtttcttgtcacttgtgaaccagcagagctgcagggccaggcctgcttgcttgcttccttccttccttttctgtctccctctctttcttttgctctccgtttctctctctctctctctcactcactcactcactcactcactcacactctgtcacccaggttggagtacagtggcgcaatcatagctcactgcagcttcaaactcctgggttcaagacatccttccacctcagcctcccaagtccctaagctgggactgcaggtgtgtgctaccacgtccagctaattcttgccctttttgtagaggcggggctcgctgtgtttctggggttggtgtcaaactgctgggctcaagggatcctctcacgttggcctcctaaagttctgggattacagatgtgagccactgtgcttggcctgtagactttcatctttttttttttttaatttatttgtaatttgtgtgggtacatagtaggtgtctatatttataggctacatgagacgttttgatacaggcatgcaatgtgaaacatcacatcatagagaatggggtaccgtagactttcttgactccacttcgattgcttcttccaaaatgcacacactattatgaactattttttttctgagaaagtacttaaacccacctaaaactttattaatcatccctcagttacaggactaatttaagactcatcaataagatgatatgatattttaccattgatttccatctccccccacccttttttttctttaactggtactacagaaaccaaagctcttcttttcagcaaaatccattgatcctcctcagcctaaacgtttaaagttcaatttaacatttagggagtaaaaggtctctgaagggactcataaccattgattttgtgtcagagttgaagagctaaggtttaaaacacaccgatcctaccaggttatgagagccttgtacctacagccatatggaattgtatgcttctcttactgtaggtttttttttttcttttctgcagaggttacgataaaagcacttaaagagaaaatccgagaatatgaacagacactgaagaaccaagccgaaaccatagctcttgagaaggaacagaagttacagaatgactttgcagaaaaggagaggtgagcatgacttccaggcacacacagactgacatagcatttgcccctgaacttcacatcatcagacatgttgataaatggatctgcaaaataagcccaggttgtaaccccaaatctataaggggtaaaatgtttcaaaaatgatattctggctgggtgtggtggctcacgcctgtaatctcagcactttgggaggccgaggtgggtggatcatgaggtcaggagttcgagaccagcatgaccaacatggtgaaaccccgtctctactaaaaaatacaaaaaaaaattagccaggcatggtggcgcacgtctgtaatcccagctacttaggctgaggcaggagactcacttgaacccgggaggcagaggttgcagtgagccgagatcgcgccactgcactccagcctgggcaacagagtgagactccatctccaaaaaaagatattctacatttgtgaggtttccttgagcgaaatgcatctgtctttcccaatcggtggatggtgtcaggcagccagtgggcccaagactatccaagccgtgcaggtgcagaggtgaagctcaaggcatgagtcgttagcaaggcggcacctggcagctggacctgggctgagaccagagaggaaagcccatttcccagtgtgtgtcctctggggacaagccctgggctagtgctaaactctttctgccttctcaagcaaattgatatttaatattacacacacacacacacacacacacacacacacacacacagactctctgatgtatttaatattacacacacgcgcacacacacaatctcagtgggttttttggtattgcctctttcattacctcacatatcagggagttagtatcagtaaaatatgttaatgccctatgtaactgatgtgagttttagatttctaatgacttacattaccaaaaacgtttcccacaaataatgagttggttttcccctagtgtgatgagttaatgaaagttagattccttgtaacaacaataaggactattgagcttacggatcccaaccatatagatctttttttttttttttttttttttttaagacagagtttcactctcattgcccaggctggagtgcaatggcgcaatctcggctcactgcaacctccgcctcctgggttcaagtgattctcctgcctcagcctcccaagaagctgggattacaggcatgcgccaccacgcctggctgacttttgtatttttagtagagttggggtttcaccatgttggccaggctggtcttgaactcctgacctcaggtgatccacccacctcagcctttcaaagtgctgagattacaggtgtgagccaccacggctggcctagattggatttttttaaactcatgggttaaattaaggtattaagttttatacccgctcccatcaagtaaaagaaaagcaaaaaagggaaaaaaaagatactgaattttaactctagtatgaagaaatgtatgtatccatcaacaggaagcactaaatttatgactacaggtaaggggccaagtgggactgtggctggtgtgggattttgttgttttattttcagttgacttcctatgctgaatacttggtgaacttttcttttttcttttttttttttttttttttttttttgagatggagtctcactctgtcacccaggcttgagtgcagtgtcgcaatcttggctcactgcaacctccgcctcccaggttcaagtgattctcctgcctcagcctcctgagaagctgggactacaggtgtgcacgccaccacgcccagctaatttttgcatttttagtagagacggggtttcactatgtcggccaggatggtctcgatctcttgaccttgtgatctgcccgcctcggcctcccaaagtgctgggattacaggcgtgagccaccgcacccggctcttggtgaatttttctaaggtgggctctgtaacaatatcattgggttaggaggtggggcttagacactggaccaaattgaagactagctaaaacagggcctggagagaagcagctttctataaaacatgcccaccagtgtgccacatcagtttaccattgccttggcaacacccaggagttaccacccctttccacagcaatgatctcacagcccaaaaggtactacccattccctagaaatttctgtataaactgcctcttaatctgagtacagattatgagtacaaaatatgagtacaaaactgtcctcagctgctactggcagcacacggcctatggggcagtcctacctcacgagaccagtcacagagctgtaacgctgccacctccataaagctgccttcttcagccctaccaccagctcgcctttgaattccctcctggctgaagcccagagcccttgccagctaagccctcctttggggctcgcctgccctgcagcatcatgaaggcctctgaggaatgccattaagctgacttcattcaaaaagaaaactggctgggcacagtggctcacatctgtaatcccagcactttgagaggctgaggcaggaggatcccttgaactcaggagttcgagaccagcctgggcaatatagagatatgccatctctatggcatgaatgaatgtatgaatgcgccatgcatgtcagcatgtgcctatagtctcagctacttgggaggctgaggcaggaggattacttgaggtcaggagttccaggctgcagtgagctatgatcaggccactgcaatccaacatgggtaacagagcaagaccttgtctcaaaaaagaaaagaaaagaaaagaggctgggcgcagtggctcacacctgtaatcccagcactttgggagggtgaggtgggtggatcacttgaggtcaggagttcaagaccagcctgaccaagatggtgaaaccccatctctactgaaaaaatacaaaataagccaggcgtggtggcacatgcctgtaatcccagctactcgggaggctgaggcaggagaattgcttgaacccaggaagcaaaggtttgcagtaagccgagatcacaccattgcattctagcctgggcaacaagagcaaaactctgtctccaaataaaaaataaataaaagaaaagagaactgccagctcccgcccacccggggccctccctgcatcagaacttggccgtaggctttcagtacattctctcactaattgcccagaatggatctgcaatgtagaccatctcttttcatagagggagaaagcaggtcgtgggtgaggtacctcctacagcttttgcggctaatcagggccagaggtgggactttgcaactccagactggcacctgcccatctctgcagcccttgcctccccgtctgctccattgtggccacctggagccctggttgccggaccaaggccagtcccttggggccacgcccaactctgcaggtggaggccgcatccatcgtccctgggggagcgcggcagggcacagactccaggaaaggagtgcgcatcacagagtcaaggctcggacagatgggcagacccttgaccccgttgatacggatttggtcctaagtaaatgccttttaggaaagcactcctcaccagtgagtgatcaagggggaaaacgcgagcaatctcagtgccctgccatggagaaatgggttagtaaaaagaacggaccatccctaactgggatgttatgtcaccgttaaaatattaataatagttatggagaattcatagtaacatgagaaacgtacctaatataatatgaagtcaaaacatgcaccgtacaaaattatttacagtgcagtatgattgtacatcttcctacagcaaactcatgcattaccacaatgtggaaataaacacatatgggaattaaatattattaagttgacttttcttgttttttgagacagagtcttgctctgtcacccaggctggaatgcagtctcacaatctcagctcactgcaaccctccgctccaggttgaagtgattctcctgcttcagcctcctgagtagctgggattacaggtgtgtgccaccaagcctggctaatttttcagtagagataggttttctccatgttgctcaggctggtttcaaactcctgacttcaggttatctgcccgcctcacctcctgatgtgctaggattacagacataagtcactgtgcccagctcttgacttttcaaattaggtaaagggattagctatattaaaatatacaataactgattcttagagggaagggctgaagctagaatttacttcattcattttgtgtgtgtgtgtgtgtgtgtgtgtgtgtgtgtgttttgagacaaagtctctctgtcacctaggctgcagtgcagtgacacgatctcagctcactgcaacctccacctcctgggttcaagcaattctcctgcttcagcctcccaaatagctggggttacaggtgcccaacatcacacccagctaatttttatatttttagtagaacaggatttcaccatgttggccatgctggtcttgaactcctgaccacaagtgacctgcccaccttagcttcccaaactgctgggattacaggcgtcattctttataacaaaaaattgttgatggatctaggatttaaatattataattttttgtcacaaacatactggaagaaaactggggtgcatatttgtttttattaatatgactatataaaacttaaaacagattctcaaaaacaaataataacattttaaaaacatcaacaaactgaagaaatatttgtaccatgtaagacaaaaggctaattttctttatatacaaagaggacttctaaattaataagaacaaaatccgctctacaaaaataggcaaaggagataagtaggcatgtcatacaaagagaaataacatagctttactcagcagtaaaaatttaaatttgattttatcttgtgttggcagagtatacgaaaacacacttacatattgttggtgggagtttaaattggtgaaagttttttgttgggaagtttttcactatctatcaaaacaagaaaagtggccaggcgaggtggctcatgcctgcaatttcagcactttgggaggctaaggcaggcggatcacttgaggccaggagttcgagaccagcctggccaacatggtgaaaccccatctctactaaaaatacaaaaaacagccagacttggtggtgcacacctgtaattccagcttcttgggaggctaaggtatgagaattgctcgaaccctggagcagatgttgcagtcagccgagatcatgccattgctctccagcctgggtgacagaacaagaccctgtctccaaaaaaaaaaaaagaaaaaagaaaaaattgcagatactctttggccattgtaattcctctgttagcatttcatctccaacagattcactctcaaaattatacagcagtatctccacaatgatcgttgagggactgttcagtagaaagaaacctagaaacaatctgagtgtccacagaggcttaagttaattatttaataagaatgagggagaactatgtttgctggaatagaacatttccaaaatacagagaaaagtgaataagggaccccagaatgtggtgcacgttgtgatcacctttgtattaaaagaacagggcagggagattatattatactatactatattaaacacttctatttcagtagcctatttcatattcatattacactatagtatattacattacttcattattacactatagtatcctgcatattagttcgtactatgctatagtatatttcattcatattttgctatactatgtgacatattaatttatattgtgctatagtgtgttacatattcacattatgttatagcatgttacatattagttcatattaagccgtagtatattacattagttcacattccactataatgttacatattaattcatattatgctatagcatgttacatattagtttgtattacactatagcttgttacgtgttagttcatgttacgctctagtgtgttacgcattcgttcatattacgctgtagtgtgttatgtattagttcatattaccctataacgtgttacatagtagtttatgttacactatagtgtgttacgtattagttcatattatgctatagcttattacatattagttcatagtacactatcatttgttatgcattaatttctattatgctatagtgtgttatgtgtttgcttatattacactataggctgttacatatcatatgttacatattcatattttgctatagtatgttacatatttgtttatattacactttagactgttacatatgatgtcgtatttctgtacatgcagaaacattttagaaaaatacaaatgaactccatctgaggagcggaaatgagccaaggaatagtaagactctttcacttcccatgctcttgtcatatttgattacatccctgagtgtccataattgaaatacatgaaaatattaacagtgcttttctagaggtgatgagaattgggttgactttgtaaactgtgtcatttctacttttctgtatcccagtttattattatgagagcatatgttaaattcatatgatataaaaataatcaacttatttttggaggggtttttttttttcccccagattaagaggaaggaatgctatttattgaccagggaattcacttagagatcctgggaaatctgaatctgtggaatgcagttgcgagcattcacaatgtccccattaggtattgcagttgcgtttgcattccattataacagagacggaacagctgccacatctatttagtgcatcctttattccaacaaactccttcattgtgtcagcagaatgtaaatggatcattcttcttgcgctaacttcagaaaacaatgagtgcatgatgatgatttttttttttctttttaaaatctggcatttcaagaacaaattacatttaggataaccttctacgccagttaccacccatcaagccccacgggttgcacacttgccgtgatgtgacacgcagttacaaagttggggtgtggaagctgcgggagcggggcccacggcacacgtgtcgttgcgggcgataccccgtggtgcgcctgccgccagctgagcgcagggagggagctgagctcagccgaaaggcacacgtgcatttcagttggtaaaggagatgaccaatttggcttcgtcctcttcctttgcagaaagctgcaggagacacagatgtccaccacctcaaagctggaggaagctgagcataaggttcagagcctacaaacaggtttgatactctccttcctagtaccatggatgtggggaggacccagggggagagttgggtcagcccctgaccgccccggtccccgcggatacctgttgctcttcggggccgtgggagctgccgggagcccacgctgaagaattccgcagcacgcccgccagctgctgcgcctcattcctcactgactttgagttgttaatgtagaggtgggaggatctcgattccattttcatcccttccacacgccatccttgcttcctgctctttttccaacaaacacttctaaatcaccaaactgtcaaggactgacatttcatttggaacaataatagaaaaaaaaaaaaaaactcacttctaccctaagtgaagttaaggagaacagtaatttcagacctttaaaatttaaaagccaccaaaaaaggttatgctcaagtttttacagtatctttaaacttctttctctctctctttttttttttttttttgagacggagtctcgctctgtcacccaggctggagtgcagtggcacgatcttgactcactgcaagctccgcctcctgggttaatgccattctcctgcctcagcctcccgagtagctggggctacaggcgcccaccaccatgcctggctgattttttgtatttttagtagagacgaggtttcatcatgttagccaggatggtctcgatctcttgacctcatgatccgcccacctcaggctcccaaagtgctgggattacaggcgtgagccaccgcgcccagccctctctctatttctttttttgttttgttttgtttttgttttttttttgagacagggtcttgctctgtcacccaggctggggtgcagtggtgtgatctcaggtcactgaaacctttacctctgtgggctcaagcaatcctcccacctcagcctccccagtaggtcggattacagatgcccgccataatacccgcctaatttttgtgtttttagtagagatgaggtttcaccacattggccagtccggtctgtatctcctgagctcaagtgagccaccacacccagcctctcttttttatttctgaaagagaagcatcaccatgtatttcatttaaatgtatttttaaatttttattattttttttgatgacccagaactgagcagattatttaaatgtagacagacatcagaagtcataattcaacttaaaacacaaatgacgagagtgggagaaaataatcaccacaaatttgacaaacggataattaaaaaatgtaaaggctgtaaatcaatccattaaaggagagaaacagtgcagtcgaacaataagcaagggatatgaacagtcagttcacagaagaaatgcaaatggaaactacacatatgaaaaaatgcaaagttttttttacagtcagggagatgcagattcaattagtgaaagactgttttgcctgtcagactgacagcattttttaattatttatttatttatttttgagacggagtcttgctctgttgcccaggctggagtgaagtggcacaatctcggctcactgcaacctctgctccccgggttcaagtgattcttctgccccaggttcaagtgattttcctgcctcagcctcccgagtagctggcgttacaggcgcatgccaccatgcccggttaatttttgtatttttacgaggtttcgccatgttggccaagctggtctcgaactcctgacctcaagtgatccacctgcctcagcctccgaaagtgctaggattacaggcatgagccactgcacccagcctaattttttatttcattttagagacatggtctctctctgtcgctcaggttggagagcagtgatacaatcatagctcattgcagcctcaaactcctgggctgaagtgatcctcctgcctcagcctcccaagtagctgggactgcaggcaaacaccaccacacatggctactttttttttcattatttcttttatggacatggagtctcactgtgttgcccaggctggtcttgaagttctggcctccagtgatcctcccacctcagtgtcccaaaatgctgggggattacaggtgtgggctaccgcacctggcctttaaaaaaaatatagcaattctggcctgacaaagacttgtcaaaaattattgaaacatccagtgttggtgacggtgaagtggcacttatggaatggatgggcatggaaggagcctcttgggaggccagctgggtggcatttatgtaaagctccagtgcccaagctgttcagccagcagcttcacttccaggtatcctgatgagagaactgaaggttattgccactgcctgggtccacatgtggaaggactcccataccatactgcccagggaaaaaggctagtctcaagaaatattcataccgtcccatttatgggggtagaaaataaaaaaagatatatacacacacatatatacatgcaattatgtatggaaaattttttcttaacgtaaaatacactttcttttattttgttacacttttttgaaatgagtctcgctctgtcacccaggcctggagtgcagtggcatgatctcggctcactgcaacctgcatctccagggttcaagtgattctcctgccttatcctcccaagtagccgggattacaggctatgcgccaccatgcttggctaatttttgtatttttagtagagacagagtttcgccattttggccaggctggtctcaaactcctgacctcaggtgatctgcccgtgtcagcctcccaaagtgtgagccacctcgcccaaccagaaataataaaatacaccttaaaacatgaaatcatccaggtacagtggcccacacctgtaatcccagccctttgggaggccaaggtgggaggatgacttcaggccaggagttccagaccagcctgggcgacatagcaaaaccctgtctctacaacagtgttttaaaatattagccaagcgtagtggcttgcacctgtagtcccagctacttgggaggctgaggcaagaggatggcttgagcccaggagttaaaggttgcagtaagctgtgattgtgccattatactccagcctgggtgacagagtgagaaaacttgtctcttaaaaatggaagggaaagaaagaaagaaggaagggagagtgggaaagaagaaaggaagggagggagggagggaggaaactattaacattggttctgtctttgtaggtgcttgggattagatgaggcagaaatgaagggggatttcctattccattttttgtattttcatcatcttggcctcttttgtgtgtttttaatctttatttttccacgcacctcgctcctcacagaaatctttgcctcttttgaaatgggaatagattacctgtgtatgcattcttttaaaatttcatttaaatagttagtaattctttgcctttcagccctggaaaaaactcgaacagaattatttgacctgaaaaccaaatacgatgaagaaactactgcaaagtaagtctctctgcttggcctcccttatccgtacacatttctcacctgattttgcttgagtagggcaggatcgagaaggttcttgacctctgtgctgctgcagggacacagtgtatttcccatgagttacttgcgtcggttcaatgcacgttctagcactcactgggtaatccttccaacaaacttctttccttctttattgtgaaggctggtcactgctatgccttctgccatgaaaatttgggagttagtttatataagatgtgacacatgggacattttttgtgtggagttgagtctgggtaaatcacatgtctttttcgctgggccacagttcttcatttctcccagggccctttaggaaggcctgccccagaataagcacattcccacgcaggcataggggttcatgtcacacctaacaacgctaggtgtggatatacggatagacacagattcgggcaggcagagtcacaaaaggccaattcctacccagctcttgtccaaaggaaattagaggtgtccactacaagtgtactttttacccgcccatctttcatgcagaacaccagcaaggaagaaataataattgacataaatcatgaaaagatgaagaaatggcagaaattgctcctagccattgcctcctctaccaaactcccggggagcaatgccaggctagagtttgaaccactttttcctgttctggaaggctcttcccatcttccgcggaaacacacacgcgtgcttactgccatgtctcttgggtttccctattccagttacaaaggtccccgcactctgctcacacagtgcctccgtgggcatcggcaagaagacgggtacttctgaatggcgccgctgtcccaccaggctccacctctgtatggggtgccggcacttactgtccctctgccccatctcacgtgaccttgggctttgagggtgctgctgggtctgttgctttcaggatgctgtgtggggttcttggccctttgctctgggtcatttagtagcctgagacctcgagagcccagcttcgtagcctggtggtcagaatggattctgatcatgagtatgaaacttacaaagactaaaacatcaccactagatcagctactctcttctctcaattactgcttggacctgattaagcaacttacttacttgcactaagtaggttgtttttctcagtaaatctgatttttaaaacttactatatttcaccgagcatggcagtgtgcacctgtagtcccagctacttgggagcctgaggtgggaggatcacgtgaacccaggagttgaggctgcagtgagctgtgatcgtaccagtgcactccagcctgggcaacagagcaagaccctgcccctaaaaaaatttttaaaatattgttttagttttaaaaaacatgtcaggggctgattgtccttcacataaaaattagccctgtctcaggactgtagctgagagggcagtggctctcttggggtgcgccccacctgccctctgaagtaagaaacattcttgtctccccagtggtgagccaggccgaggggtgtggtgtgcatgaagggagagagactcactcggttagatgataggcatggctcagagataatagattcattcattgattcaacagacattcacagaggcttcctctgtgcctcgccctgtgcaaattctgagactgttacggctccatggggagacaggccattgcaatccagcatgcccagtgctgcaatcaaggggacagggcgctgacggtcagcaggtcagacagggagcctgcaggtggcaggcagggcactcccattgggatagtcagaagaaagtttggcagggtgcagtgactcacgcctgtaatcccagcactttgggaggccgaggcaggtggatcacctgaggtcaggtgttcgagaccagcctggccaacatggcaaaaccccatctctactaaaaatataaaaatcagctgggcatggtggcgtgcgcctgtaaccccagctactgaggtggctgaggcaggagaatcgcttgaactctggaggcagagattgcaatgagccgagatagcaccactgcaccccagcctgggctacagagccagactccatcgcaaaaaaaaaaaaaaaaaaaaaaggtcaatattgggcctatttgcagaggtgcagttcctaggctcatagtaccggcagggtttccacgcctgggtttgaatgagccagagcggggaaaggtagctagagactgaaggtgagggccccctcgaggggagccgtggccttggggagggaagagggacccagggcagcgccagggaccccttaactgatcccctctctcctcccaccagccaggggagctggggaagggcatagtacatccctagcatcaggggagcgcagggaaagaattgtcgaggaagccttcctaaagagggtggtatgggattcgggattggaagatgagtcaagtcaggttttgcagaggtttgtgaagatgcaagcctggcgaagcctgtcttggggaggacctgccagaggttccgaacgatttgcctgtggggtaggatggggcagcctggtggggcatttcccacatcagaaacggtctggacactgacaaaggcagcctaggaccaaccacgtaatgtaatagttcccagagtaagtcatcccccaaaaatgcagagaatggcctgagagaattggatcttggctactttcttttaactttggaggccatgggctcattctgagacctcccccactgcctttgcctccccttttattttccaggacagatttgtcactattccgtctgcttcaagtccaacctacatgtattttattagaccagacacgttttcattcatgtttgtgaatataagccccttggggcaaatcttttcacatatggtcttacagcatttcaaaaacaatttattttccctcttctgaaggagggattcttagggccaggcgcggtggctcacacctgtaatcccagcactttgggagcctgaggcgggcggctcacttgagcccaggagttcaagaccagcctgggcaacatggcaaaagcctgtctctacaaaaaatacaaaaattatcctggcatggtagctcctaactgtagtcctggatacttatgagtctgaagtgggaggatcgcttgagcccaggaggtcgaggctgcagtgagcctaattataccactgcactgcgacctgggtgacagagcaagaccctgtctaaaaaaaaagggattcttaaatatttgttgacgggaattggagaggcatgaaggaagatgggttttggagaaagactgacttgggattgattcactagggtccactacgagctctctgcgtgaccctgaatgagctatgagctgtccacctccctttctgacctgtacaatgggcataccggaagtcaagtcactgggtggtttttgttgttgttgttgttgttgttttgttttgagatggaatcttgctctgtcgtctaggctggagtgcagtggcacgatcttggctcactacaacctccacctcctgggttcaagcgattctcctgcctcagcctaccaagtagctgggattacaggcgtgcgccaccacatccagctaatttttgtatttttagtagagacggggtttcaccatgttagccaggatggtcttgatctcctgacctcatgattcgcccacctcagcctcccaaagtgctgggattacaggcgtgagccactgcacccagcatgctaggtggttttgaagaggcaggaatgggatgtgtgtgtatagcacctggcatggtgagagtctgaggctaagctgtcgagagatagaagctattcccagcaagctcagagcagggcgtggtatgcgtttctgaaattaacggccttggaggaaattgactttcaccgcatcaccacgacggactgggcccacattgtctgtctgtcgtggggagatgtcacagggtacccatccctctcccgttttggagagaagcccgcaggtctgtggtactgaggctgctccgagaccccggtttatcgtgagcagtcatcgccatgcgtcagctgggacagcacgggctgactgtggcagacaacggcagtaaagttttccatgtgtaggcttgaagcaaaatgtaattagcctttatgtgcagaacaagggcccattgatgaatacagctggtctttgttttgtcctgtcgttgagagtgggaggtaaaagtgttcttcttcatgtttattaatgcaagattccttagacaaatggcaagcacagtttaatatttgttggaacatgggggctttgccaaaacagttgttgtgtaagaggattgcaaggtttccgattataaccatttctgggttaaataaatgaattatttctgccctttttttcttttttgaaatttttttagagtcagggtctcactgtgttgcccagagtggtctcaaactcctggcctcaggtgatcctcccgtcttagcctctcaaagtgctgggattacaggcatgagccactacgcctgacattcttttttctttagttaaaaacatagctccttctcagatggtcaccctgtgtacggatcttcccgcttctcttagcaaatggagatttaccaccctaatagccttaaccttggagactctagcaaaggaacgtgctgtggattttaacatctaaacaattccttgggatggatggccgtggaggtggcagatccctggaatcacgcagcagtaggcagcccagagagaggcctgggcatccctcactgccccaagttcctgcatccgtctcctgcagctgttcacttacttgatcttgggtttgggttgctactgcaccctccagcaggaatgtcgccctcccagccaagcggctagtgttctgggcaaaaatgcaggaattcccatttttgctgaagtccacgatcctatgccctgtccccaagaatctggattggaaaaggagttccagctgcaatacacacagtcagcttcttgcattcctccccactcgtgggccgaggcactgagcctcgatgaaagaaaatattgaatcgcactgaaatactacattttttatagctaatgttagtcttaggagaatttgcacctcccaaacctttcctgccagtaaaattcgtatttcttaaggttactcatgttgtattcctagcctatatgcttttttcaaagaacgacattgtgtatacacatacttacatagtacggttacaaaagagacatttacgaggaacttcacttaggttaattttagagtattttctttataacatgtatataaccagtactttatcacaaaatacaacgtgctctgaaacagcagaaaactttcccgtagctaactcagcactggggagcctctacgcttctttggagggatagagaactccagatcccaaaggaggacataagacagaatttgaaaaggggaggaggctgggcatggtggctcacgcctatcatcccagcactctgggagactgaggtgggaggatcacttgagcccaagagtttgagaccagcctgggcaacatagtgagaccccacctctaccaaaaaatacaaaaattatctgggcatggtgttgtgcctttagttccatttacttgggaggctgagttggaaggttcgcttgagcctggaagttccagcctgtagtaagctatgattgcatcactgtactccagcctgagtgacaaaacgagagcccatctctaaaaataataataataatttttaaaaggaggggaggaggataccagcagttcaagacacaagtctgcatggcaaatgtgggtgggatggatactttctttttattttattttttatttttttgagatagggtctctgttagttattcaggctggagtgcagtggtgcgatcatggctcactgcaacctccacctcccgggttcaagtgattcttctgcctcagctgctggaggagctgggattacaggcttgtgccaccatgcctggctaatttttgctttttggttttttttttttttggagactgagtctcgctctattgcccaggctggagtgcagtggcacgatcttggctcacggcatcctccgcctcccgggttcaagcgattctcctgcctcagtctcccaagtaactggaattgcaggcatctgccaccacacccagctaatttttgtatttttagtagagacgaggtttcaccatgttggccaggctggtctcgaactcccagactcaagtgatctgcccgccttggcctcctgaagtgctgggatgacaggtgtgagcagctgggatggatactttgtttacatactgttctggactatttcacaatgatttcctgagtgttatcttgtttgccctttcctgaagtcactggggcagcttttattgtgctcattgcatggatgaggaagcagtcccaggaacacgcagattcaggccctggacctggtcctttaggctcaaattccagtgctttttgcttgagaccacggcggtcttcaaagcccctttctggtgccagctttgtaatcaagcagcaaaggtgagggctagtcaggtgaaggcaggcgttcctggggggttcagcctttcccagcctcacaagcccccgttgtatttaccatagcagattgatttttccctttttgaacaataattcctcatgaaagactcacagaactggggccaggtagagcccggttgagtaaacctgagaatcacccagctgtcttgaccatcatatttagacaaatattgcatcccctgattgaatttgaaagggacaacttaagcatcctgaaaacagagtctgtctgctgtacctttaagaatgtaaaattttctatttcctgtctttttgatgagtcatcagtttccagtacgagttgctgtaattaccctggttggattaatttccctaaaaatagagaagcagccacttttatggttttcagagtatggacttgaataaagaacctcctgtcctttaaaccttagagagcactaaatcagacttgcagggaaaaaccgatggccttttttttttttcttcctgtgtcttatctccaaaaggggcttgtggattttgtagaattcttgggatttttcatctctgtacaagtattttgctccacacctaaaaattgatgcctgggtgagccctgaaggattttccttgtcttttgtagtaacaccagctgtcttggccccctctgaatagtacaaccatgacctggtgtctccccaggttgggggctagacaaaaacaagggggtggcttcatagttccaagtccaggtagaaattcctctgagcgctgacgattctttgccagttctgtggcccccagacatggctaggaaatgtaattgacatgtaatagacatgtctattgcaaagcatcagtgagaattgccaaactttactcctctccttcattgatgtttagggaagggctgctttactgtggtaggtgtggtgtcaggtgctggaacgatagagtaaggacagggtgggagggggcttacagacgtcacatgcacacacacaggctcacacactctgtactcaaaaacacgtacacataaatagagaggcagccgggcacggtggctcatacctgtaatcccagaactctgggaggccgagatgggtggatcacctgaggtcagaagttcaagaccagaccagccaacatggtgaaaccccgtctctactaaaaatacaaaaattagctgggtgtggtggcgcatgcctgtaatcccagctacacgggaggctaaggtaggataattgcttgaacttaggaggcagaggttgcagtgagctgagatcgcgccactacactccagcctgggcaatagagttagactctgtctcaaaaataaaaaaaaaagagaggcactgtgcatgtggccatgtatataaacatgtttgtgaatataaacatgcaatcagtttttaaaaaatttttatcggccgggcgcagtggctcatgcctgtaatcccagcactttgggaggccgaggcgggcgaatcatgaggtcaggagattgagaccatcctggctaacacagtgaaaccccatctctactaaaaatataaaaaatgagccaggcgtggtggcgggtgcctatagtcccagctactcgggaggctgaggcaggagaatggcgtgaacccgggaggcagagcttgcagtgagccgagattgtgccactgcactccagcctgggtggcagagtgagactccgtctcaaaaaaaaaaaaaaaaaaattatcatacagtctctcaaccagtcctactgcttttttttatttattgattttgagacagggtctcactctgtcacccaggctagagtacagtgatgcgatcttggctcactacaacttctacctcccggtttcaaacgattttcccacctcagccacccaagtagctggtatcacaggtgtgtaccaccacacctggctaatttttgtatttttagtagagatgggggtttcaccatgttacctaggcgggtcttgaactcctgagctcaagtgatccactcatctcggcctcccaaagtatgggattacaggcatgagccaccgcgcctggccaataaagcaatcatattcatccagcatcctttgagagggtagagaaaatcattattcacagactgtcacctgggtttggcgtgcattcctacagattttacctatttaagagatccttaaagtttttctgattcactgttaaggtaagcctagggatcttgcagtgtatatgtgaaggaaatgggtaacggactgttgagtgaatacagtgtatagattgtagcacatatggtgatctgtgaaacgggggtgtcatgacacaccccttcctgcatcccaaaattgtgggggtcagggtggataacgggcatttctgcagcctgcacagcagtgccgaatgcaggctgcaatccagcaatgtcactgctgggtatttatccaaagaaaggaaatggctgtgttgcaggcatacctgcactcacacgtttatcacagcgctgttcacacagcagcctaggtgaggaagtgacctatgtgcccagcttcagatgaatggatgaagaaaatgtgtagatccacagtggaatatgatggagccttacaaaaggaaatcctgccatttgcaacaacaacgtggattcatctgggggatgttacattaagtgaaatgaaccaggcacagaaagacgaataccacaagatctcactcatgtaaaacgttgatcacataaaagttaagaagaatggtggttaccagggggtgaggagaggttggttaaatgatacatatttataggtagacaggaggaataagtttgagagatgtattagacagtgactatagttaatgccggtatattgtaaaattggttagtagaaattttttttttttttttgagacagagtctcccctctgttgcccaggctggagtgcagtggcatgatctcggctcactgcaacctccgcctcctgggttcaagcaatttttatgtctcagcctcccaagtatctgggagtacaggcacagggcaccacgcccagctaatttttgtatttttaacagagacagggtttcgccatgttggccaggctggtctcgatctcctgacctcaggtgatctgcccacctcagccttctaaagtgctggatttacaggcatgagccaccgcgtctggccccattttttaagtgttgactgaaaactacctcaaaagaccggctttatcccacactctgtacaccacaggcttagcacgtcgtggctctccaggaactcttgagccttccccatgatgatgagtgggtcagggttaccgcagagctgaacggcctctgtagcgttcagcctgcagcctgcccaatgaggacgtttgcgctctggaaaggtaaactcaggatgctgttggctcctaagcagaaagcaggcgccacccagccttcaagtgcttcaacagtgaagagttaggacggaggcccagcctggaacattcacgccaccttctgcccccagtaaaattccttaaagctatgaggttctgactcaccacggggagtccctggccgccgctgggagggccttggccatgcaaatctcagtgacatagcacgtcttatttgcttcagaagtggcagaggagaaagtgacttgcctcacgctgcccggttccacccagggaccttgtgaagagacgcgggaaggctggcagaaaggagaaccgtccttcctgtggaatactcccgagatcgcaccactccactccagcctgggtgacaagagcaaaactccatctcaaaaaaaaaaaaaaaaaggcactgtacatgtgtccatgtatataaacatgtttatgaatatacataaataattttttaaaaaattttgtcatgcagtctcagccagtcctgctgtttttattttattttattttattttatttatttttttgagacaaggtctcactctatcacccaggctggagtgcggtgatatgatcttggctcactacaacctccgcctcctgggttcaagcaatcttcccacctcagccacccaagtagctggaattataggctgtttccttttacatgacattattttcccttttttatgttttattttattttatttttgagatagagtctcactctgttgcccaggctggagtacagtggtgcgatctcagctcactgcaacctctgcctcttgggttcaagcgattctccagcctcagcctcccgagtacctgggactacaagtgtgcaccaccatttccggctgtgtgtgtgtgtgtgtgtgtgtgtgtgtgtgtgtattttttgtagagacggggttttatcatgttggccaggctggtcttgaactcctggtctcaagtgatccacccgcctcggcctcccaaagtgctgagattagaagtgtgaggtaccacgcccggcccgtgacattatttttaagtacaaaagccatacatgtttactatacaaagtttagaaaattctcaaagattttttttaaaggaagcagatcatcactcataatcccacagcaaagatgatcattgttaacattttggcctatttccatagtctttttttctatacagattgttccttacaatggcattatgtcccctaaacccatcgtaacttgtaaataccttaagtctaaaatgtgtttagcacacctaacctaaatgtcatagcttagcctcgcctattttaagcgtgctcagaacacccacgttaattagtctacagttaggcaaaatcatctaacacagctgtccccaaccttgttggcaacagggaccagttttgtgaaagataatttttccatggaccagtgcagtggggggcgcggttcaggatgattcaagcacgttctatttattgtgcactttattattatgacattgtaatatataatgaaataattctacaactcaccatcatgtagaatcagtgggagccctgagcttgtttttctgcaactacacagtcccatctgggggtgatgggagacagtgacagatcatcaggcattagattctcataaggagtgtgcagcctagatccctcgcatgcgcagttcacagtagggtttgcactcctatgagaatctaatgctgctgctcatctgacgggaggcagagctcaagcagtcatgagagcaatggggagcagctgtaaatacagacgaagcttccctcctgcagcgcatctcctgctgtgcggcccagttcctagcaggccacagatgtggccaagggactggggacccctgatctatatagtgctttcttttttcttttttttctttttacgagatagggtctcaccctgtcacccagcctgcagggcagttgcactatcatagctcactgcagcctccaactcctgggcttgagcgatcctcccacctcagcctcccgagtagctaggactgcaggtgtgcaccccacaccaggccagttttgtattttttgtagagacagggtcttgccgtgttgcccaggctggttttgaactcctgggctcaaacaatcctcccaccttggcctcccaaagtgctgagtgggattataggcatgagctgcttcgcccaaactcgtctgttttttaccagtggcatagactgataacatgattttgatttctagggtttgttttttgtttttgtttttttttttacctgacatgttgtaaatatttcttgcttatcattaaatattcttcagaaacacagtgcatactgcataacattccatcacgtaggtgagccctaagacttaccacttatttccctgctgttcaggagcctgatttattacactgctttcattgccctttggggtttaatctggggagctttgtccctgttctttctatgccttcatgttctgccagtggctgtggcatctttttcgtgttttttgtttgtttgtttgtttgttttgttttgtttgagacggagtcctgctctgtcacccaggctggagtgccgtggcatgatctcggctcactgcaacctccacctcccagatttaagcgattcttctgcctcggcctcctgagtagctgggactacaggtgtgtgccaccacgcccagtgaatttttgtatttttagtagagacagggtttcgccagttggccaagctggtctgacctcaggtgatcggcccacttcagcctccagaagggctgggattacaggcgtgagccaccacgcccagccggctgtggcatcttgaggtagcctcccaaggccatcatcagacaagagcgtttggaagcccagaattctccaagggctcatggcagtactggcacggggcctctgttcctagactgctgctccatgacgtttgtagatgcctctagtgaaaagtcagggacagtggatgatatgcacggctcagagaccctgactctggtcccatctgtccccaggtgtgaccccacaaagcccctccctcggccgcagcaccggattgggccgggtgccaggcaggacggaggagctggcccttttgtcagcctcttgcactttcttgcccagttctacttcccagagacctggatctcggatgctgtcccccagcagggcctgtttgtggagtggccttcaggcagggctgcatccagggcaccgggcacagcatgagtcacggtgggaagaacctgggtcgcaacatcgtaaagacctgggtttaattcccaactccatgaattatgtaacctcaagcagggcaggaggtttccttactcagaccttagtattttcataagtgaaataaaagaatgccacgcctcacctgtaatcccagcactttgggagatcaaggcaggtggatcacttgaggccaagagtttgagaccagactggccaacatgaggaaaccctgtctctattaaaaatacaaaaatttgctgggcgtggtggcatgtgtctgtaattctagctactcgggaggctgaagtagaagaatcacttgaactggggaggtggaggttgcagtgagctgagatcccgccactgcactccagcctgggcaacagagactctgtttcaaaaaaaaaagagaaaagaatgccacattagtgcctggtacaggacctctataaagggtggctgacattgctgctcctgctgcctgcaaggcacctggcatcacctggcacattttaaaaaggtctgcttacctccccctgctcaaggtctcttcccactcttaagaattatgtcgctttccatgatgagtttgtaaaaatcattatccgcactgcaagacctactcatccatattagcgtgccacagctggggcacccaggtgtaaagctttgtttcccatcatcttcctcagggaccctaaattttaaaatctgcatcagtcaccattgaggtgccactaaatgtggtggccaaaagttccaagttcaaaccattgcacagctgcaaatgccttcatagatgggtctctaaaaaatcaaacaccagggctgggcacagtggctcacctctgtaatcccagcactttgggaggccaagatgggcagatcacttgaggtcaggagttcgagaccagcctggccaacatggtaaaaccctgtctctactaaaaatacaaaaattagctgggcgtggtagtgggtgcctgtaatcccagctactcgggaggctgaagcaggagaatggcttgaacctgggaggcagaggctgcagtgagccgagattgtgccattgcactccagcctgggaaacagagtgaggctccatctcaaagaaaaaatcaacaccagaggttaataatctagtaactaactgtcttctatgtgccacatttttgcaagatccaagttttaaagtgagaacaagttgttcggtccccgcccagctgactgtgacaccaaggtggcggcccgcattggagatctggttccatctgacttggaaaatttggggcaccgtgggctggtgtgaaacaaattaaaagaggtgccaaacagccaggcacccagcaaggatgcccagggctcttgttcggggatttcgttaaaaaactttttggaacccacctcaaagaatgaaaagtttcctataggaaggcaggagcgagcgagataattgaactcattgatttccttcacggcttgtttgccctttcattctcttcccgaggtgctatttgttgaggaatgtctccaattgccagaaagacagtggggtgtctcatatttcctcgccacctctcctttcagccagtgctgagttctaaggcaagcctgcaatatgaatttttaatgccgagctttatggcatcactcccgcacagcccgactgcatcactctcctgagccttcagatttaatgctccaatgaacagagcaaagactggggcattcaacatcagtgagaattaacccccacatgaccacagcagtgccctctgattttcctaaagagggttgggaaaaaataaaaattatgtagtgttggccgggtaaggtggctcacacctgtaactccatcactttgggaggctgagatgggtggatcacctgaggtcaggagttcgagaccagtctggccaacatagcaaaaccccatctctactaaaaacacaaaaattagctgggcgtggtgacgggagcttgtaatcccagctacttgggaggctgaggcaggagaatcgcttgaacccaggaggcagaggttgcagtgagctgaaatcacgccactgcactccagcctgggcaacagagcaagactccatcttataaaaaaaattatgtagtgttgagaatccttgctatccaaatagcctgaagcacaaaagcacagcttattcttgaaattttatggaatagcctatattttgacctttttgcttcttctaagttggacgatgtgtgcttcgaagcatttctgtgatcttcccacccttaaaaaaaaaatctctgcaggctgggagtggtggctcacgcctgtaatcccagcactttgggagactgtggtgggcagattgcctgaggtcaggagttcaagaccggcctggccaacatgatgaaaccctgtctctactgaaaatacgaaaattagccgggcgtggtggtacacgcctgtagtcccagctactcagaaagctgagtcagcgagatcatgccactgcatttcagcctggtcaacagagtgagactccatctcaaaaaaaaaaaaaaaaaactctccagtttgtaggatttaatgaatatatagatgaccggctgttctgcggtttccgtggaaagcccaaatgtaattagaaatccaatttccgatcgatttttccaatggaaaaaggaccagttgtgttaagtggctaattctttttttatgcagatggttgattgtcattttcttatagtagctttctgaatttttgcagacgtcaaaactaagaaaaagttgtatataaaaattgctcaattggccaggtgcagtggctcacgcctctaatcctaacattttgggaggccgaggcaggagggtcgtttgaggccaggaattcaagaccagcctgggcaaaacagcaagacataatttctgtttaaaaaaaaaaaaaaaagtttgaacataaaaactgctcaaatttaagtacattaaagaaggacagagtctttagtaaatggtagaataacaagccaactatgtagaagccagtagaatcagagctgagccccatgcaaaataaaatctatttagttatttttatttattttttattttatttatttattttttttttttgagacagggtcttgctgtctcacccaggctgaagtgcagtggcgtgatcttggctcactgcaacctctgcctcccaggttcaagcagttctcctgcctcagcctcctgagtagctgggattacaggcgcgcaccaccatgcctagccaatttttgtattttagtaaagatggggtttcaccatgttggctaggctggtcttgaactcctgacctcaagtgatccacccacctctgcctgccaaagtgctgggattacaggcgtgagccaccacgctcagtttagatgtttaaaacatttaaatgtgaccagaaagaaatccataaaaacactaggagcaattttaggtgtatatttatataataagggggtggaaaaacttttttttaagcatgatgccaaaagtagaaatcacaaagggaagaaattcagagctttgtggagatggatgggcgggtggatagatggatgggcgggtggatagatggatgggcgggtggatagatggatgggcgggtggatagatggatggatggacagacggatgggcagatggatttagacagactggcaaaaatatttgcaatatatatgagagagagagtgtgtgtgtgtgtgtgcgcgcgcgcgcgcgcacgccacgcacacacgcatctttacagaacaataagaaaaagtttcatttcccaatagtaaaacctctatattttcagtttcttactagacatttctactatgagcatctcaaactcagattaagttgttattctccgtaacttcccccttccctatagtcagcccccttctgctttcttcctctgcccgaccatacctgctcctccttcattccagaaactgagggtatttcgtcactcctttgtgagccctcctgtctaattcatgttagttccgccttcttgcaacattgtacattcccaacttcatcaccactctcactaccgtcattttaatttgtttttctttgcttttctttttttttttttttttttgagacagggtctcgctctgtcacttgcagtggcgcaatctctgctcactgcaacctccacctcccaggttcaagcgattctcctgcctcagcttcctgagtagctgggattacaggcacccgccactacacctggctaatttttgtatttttagtagtgacagggttcaccatgttggccaggctggtcgcaaactcctgacctcaagtgattcacctgcctcagcctcccaaagtgctgggattacaggcgtgagccaccgcacccggccttaatttgtttttcgtctcttggtctcacttcaagatcttctgaacttgaccctctgccaccagtatctccctggacaaaaccaccctccaagcatctgctaaagttatctttctaaaatctgtctgatcctgctaaaacctgtcccacttaaaatctctccgtggcaccctctctcatatctaagggaaagtccaaaatcacagcatgatgcacaaggcactttgggatgcagccctgccttcccagcctcatcttaggccaactcaaactccaccgtcctatagaatcccaggcctttctttccccagctcaccttgcagccggttctacctttcctgacaagctgatcctgccctgccttgcctgctcctatgcccacacttacctgctgtggtgaaagagggctctggtctccctcattctaggggctcttcatgtggggtctatagagagaacctgggggcttcatgaattggacccagaaaaaaatacatcttttttttttttttttttttttttttgagatggagtcttgccctgtcacccaggctggagtgcagtgatgcaattgtggctctctgcaacctccgcctcccgggttcaagcgattctcctgccttagcctaccaagtagttgggaccacaggcatgtgccaccacacccagataatttttgtagtttttagtagagacagggtttcaccatgttggccaggctggtcttgaactcctgacctcgtgatccacccgcctccgcctcccaaagtgctgggactacaggcgtgagccaccacactcggcctagaaaatacatctttatttccatcagtgtctaactgcaatgtagcatttccttccattgtaaatgaagcccccacaccggggtaattgcagactgtgacctcgttgcgagtggaaatcacagaggctttcacatctcattcccgttgttacggaggtcacaaacgctgtttggattcatcactacttcaaaatgtcagtggttcttagatttgttatttagtgcaacagtaaagaacagttgttcctgtatcacaaatctggttttaaaaaaagattgtcctggcgcgctggctcacacctgtaatcacagcaccttgagaggccaaggtgggcagatcactttgaggtcaggtgttcgaggccagtctggccaacatggtgaaacctcatatctcctaaaagtttaaaaaattagctgggagtggtggtgggcacctgtaatcccagctactctggtggctgaggcaggagaatcgcttgaacccgggaggtggaggttgcagttagctgagattgcaccactgcacttcagcctgggcaacagagctagactcagtctcaaaaataaaaattaaaaaaaattgcaataactgcacttcaaaataattgttttccttggtccttaaaacatgattagacttctgtccaataatggccttgtggacttacgtctttaaaacattccaaatagatgcctgtattcttgacaagacttccagaggggaccgtggcaaaggaagggttaagcatctgcgtcagactgacagtgtcttgaccggatcctcctccgtctttcccccaccgctttgcacagtgccacatgactttttatttgttttgagacaggatccagctctgttgcccagactggaatgcagtggcgcaatcacgactcactgcagccctgacctcctgggctcaagtgatcctcccacctcagcctcctgagtagctgggactataggcaagtgccaccacacccagctaattctttttatttttagagatggggtctcactgtgttacccaggctggtctcaaactcctgggctcaagcgatcctcccacctctccctcccgaagttctgggattacagacaggagtcacagcgccaggtccctatttattttactctttgtgtgtttccttatatcctgtaaaaatgggtacagtggaaactgggcagtaattctacacgtattctggattttagctactcacatttatggttacttttacctatcaattaattgcttttcttttcactcgagttttagtgattttcactgtccaaaagaatcgtgtatagttgacccttgaacaacacaggggttagaggcactgacccccgacacagtgaaaaatccaagtacaacttttgactcctcaaaagctttactgacagcctgctagtgaccggaagccttaccagttacatgaagtgccgattaagatgttttgtaagttacatatgttatatacaatattcttccaataaagtaaggcagagaaaagaaaatgttaagaaatcctaaggaagagaaaacacactttccgttcattaagtggaagtggatcatcaaaaaggtcttcatccctgttgtcttcacatcaagtaggccaaggaagaggagggttggtctcgctgtctcgggtgacagcggaggaggacgtggaggaggtgggaggggggccagacacactcagtgtaattttactgaaaaatattcaagttgaagtggaaccatattgttcagacccatatttgagggtcaacttgtgtgtgtgtgtgtttgtgtgtgtgtgtgtgtatgtacacacacacaaaaaataatatatataaaaacatgagtcccagcaatcttatccttaatcatttctaatgtggtttcagtgagagaaaatagtcttttcaggccaggcacggtggctcatgcctgtaattccagcactttgggaggccaaggcaggcggatcacttgaggtcacgagttcaagaccagcctggccaagatggtgtaaacccatctctactctaaatacaaaaattgtcctggtgtggtggcgcgtgcctatagtcctagctacttgggaggctgaggcaggagaatccttgaacccgggaggtggaggtcacagtgagctgagatcacgccaccacacaccagcctgggagacagagcaaggctctgtctcaaaaaaaaaagaaaatggttttttctcctcaatccattttcttatttttcaatgacctattatatctttaatgtgtctgaagtttattatatcatataaaataatatttgtttctgtttgttattctttaatactcagtttgcccaataatattgatgatttcttcccccaacatataatatctgacaaatcaggtataaatacatatagctctggatttctgtctataatttcattctatcagtctagtttttcactctaataagtgccacactcttgatgacgtctccttgttttctatttcagtatttgtatagccagtttactattgttgtttttagtttaaaagaaaaaaaaacaacaacctttagtattttggtcacctattttttctgtatgcatctcgtcattttaccaactttttttttttttatttgagatggagtcttgctctctcacccatgctggagtgcagtggcacgatctcagctcactgcaacctccacctcccaggttcaagcaattctcctgcctcagcctccccaatagctgggattacaggcaccgccaccacacccagctaatttttgtatttttaatggagacggggtttcaccatgttggtcaggctggtctgaaactcctgacgtcatgatccgcccaccttggcctcccaaagtgctgggattttagacgtgagccaccgtgcccggccattttaccaacttttataaattaacttgggagagaaatgtatgtttctttgtatttaatgcagctgcacataaatgtatcattctcttcctttgctccaagcattttgtaatccaatttttctacagatggagtttatgctatgttattttaattcccacgtgcttctgtgtttacctctgttgtaaatgagacagatcttttatttcattttgtggatgtttattactggtgtaggggagtttgttattttcttgtgtttaccaagaaacatagggctttgctgaacgcttgattgtcccagcccatttgctcaagtgaatccctgggatttggggagcacgggactgcattacctacaagtagtgaacgtgcaccctgtgtgacactcagaacttctgatcctcttctttcattcctgtgttcagaaggagcattctgttataggtctgggaagaatcgtggaggctcttggtttaagcctgtgtccctttccatgttaatcaaatgctccaatgatttcccctctgtaaattgaactgtgacctggtttttagatgccatgggatcaaagccccgcaactgtgttagatccttctagtggggtagttttctattaggtcggtgcaaaagtaattgcggtttttgccattaaaagtaatggcaggttgggcgcggtggctcacacctgtaatcccagcgctttgggaggttgaggcaggcggatcacctgaggtcacaagttcaagaccacactggccaacatggctaaaccctgcctctactgaaaatacaaaaattagccgggcgtggtggtggatgcctataatcccagctactcgggaggctgaggcatgagaattgcttgaaccctggaggtgaaggttacagtgagctgagatggcaccgctgcactccagcctgggcgagaagagtgaatctccgtcaaaaaagaaaaaggtaatggcaaaaccacagttacttttgcaccgacctaatagtaggattacacttttaaatagtacatttcattccatttttattttacatattttatagattttcttgcttatttaagacaagttgaagcttatgtttctatttactgtgccatttagcatttcttatttctccctaacattattatgctacatataatattgattagtctggcttcaaaccttaccttaattagccttaaaaaaaaaatctagttggccaagcacactggctcacacctgtagcctcaacactttgggaggccaaggcagaaggatcacttgaacccaggaactggagaccagcctgggcaacgtagtgagatcgtctcactaaaaaaagttaaaaattagctgggcatggtggtgctcactgtagtcttagctactttggagactgaggagggaggattgcttgagcccaggaggtcaaggctgcagtgagccaaaatcgtgccactgcaccccagcctgggcaacaaagtgagatcccgtctccaaaaacaaaaagtctagttaatcattgcctttttactcaaaatgtgtttctaccaccctttttggatttttaaaaaatatgtattttatttttatgggtaaatttggcctaattacattttactgatataactcttaacttaaatttctctttattgttgaattgttgatccttttcttttttctaattcacagtatctctgtcctaggctttctgatctatttaaggaagattgagtgaacagcctaattgaccctctgaatgtcccctgagccttctaatccgccctgccttgagcctcctcttgtaactgaaattcactttctgatgcagaaccattgagcccttctgaaaccttttcaaaactatatatttaaattttcttatcaaactgtactgttattagattacatgtctagcatagcagcaaattatacttcattatattaaccttgccacttccctctacaatgagacccgatcttttataagatactctggacctacaaattcctgctggtgaattctttaaagttatatggattttcaacgatcgtctactccctttacaaagcagctgctgtttagcaggattatccattagtggtaagaatcctttattccctagcatatggtaaatattttttaccaacttgaggtatgccacgtagatcccacgggatttacacacatagacaaaggcattcttctcatcacattgttttaaacaatccagctgccattttagctttcactaaacttagaaatgtatcagcttggccgggcattgtgggtcacacctctaatctcagcactttgggagatcaaggcaggcggatcatttgaggtcaggagtttgagaccagcctggccaacatggagaaaccccatctgtactaaaaatacaaaaattagctgggtgtggtggtatgcacctgtaattccagctactcaggaggctgagacccgggaatcacttgaacccgggaggcagagtttgcagtgagccgagatcgtgctgctgcactccagcctgggcaacagagagagactacatcttaaaaaaaaaaaaaaaaaaaaaaaggaatggtatcaactcgacacccagggtccttctgtaagttaaaacctgggaagtgccctaccctggcatttgaaaagtggctgaatccaatttcctgtccagaattacaatgacattgtattgatacattgatgatcaaaagcatagctaagctgtaaggctggttattggatatacatcttccaagtggagagattattaccacctgaaacagcttttggcttgtccattaagactcctttccagccaggcatggtggcccacccctgtaatcccagcactttgagaggccaagccgggggtactgcctgagcacagaaattcgagacaggctgggcaacatagcaagaactcatctctactaaaaattaaaaccactttccaaaatgaattttttttttaagacaggatcttgatctgtcacccaggctatagtgcaatggcacagtcatagctcactgcagcctcaaactcctgggatcaagccatcctcctgcctcacccccttaagtggctggttctacaggggcacaccagcacacccagctatttttttttttttaatttattgtagagacggggtcttgttacattgcccaggctggtctcaagctcttggcctcaagcgatcctccagcagtcctcccacctgagcctcccaaagtcctggaatgacaggtctaagccactctgctcagcccaaaacaaattctataaccaaaccagaaaagttgttttttgtttagctttttaccttaaaactttcattacccctacttccaacaaagtatttgaggtggatttaacacaagacacagcatcaataaagctcttaagtgaagtctgagatttaaaggagcatagctcagtggggaagatgacttctaaggcttggctttgaataaagcccaactcttcaatagcttggtgtgactaagacatgctctacctatgtgggtttgtttttttgtttgtttgtttgtttgtttgtttttggagacagagtcttgctctgtcacccagggtggagtgcaatggcacgatctcggctcactgcaacctccacctccgggttcaagcaattctcctgcctcagcctcccaagtagctggaactacaggtgcacaccaccatgcccagccagttttttgtattttagtagagacggggtttcaccatgtttgccaggctattctcaaactcctgaactcaggcaatccacctgccttagcctcccaaagtgctaggattacaggcatgagccactgcacccagcctctatgtgttttttttattgttaagagttcgaggctgggtgcagtgacacacacctgtaatcccagcactttgggaggccgaggcgggagaatcacttgaggtcaggagttcaagaccagcctggccaacatggtgaaaccccgtctctactaaaaatacaaaaaaaaatttagctgagcgtggtggtgcacgcctgtaatcccagctattggggaggctgaggcaggagaatctcttgaacccaggaggcagaggttgcggtgagccaagatcatgccactgtactccagcctgggggatggagcgagacttcgtctcaaaaaaaaaaaaaaacagcattactatgccaccctgatacactgcttggctaggagggaaaacttcttgttgcaattaacctttctatttttttcgctacgtctaagtattgtgaacttcctttgtggtattttagtgattagacaggatggagggcgttcttaaagattcatggccaaatccaatgatgtcagagtgaagggaacggacggtcttcgtggggccagcaagtctggccccatctgaattgtttgtctaacacttcacaagcagaataggaaccgctgaattattcattttcaagttgccctaaaaaaggtacttagcctgccgaaaggcagactttcggtgccagcgagaggaagaggaaggatgctgtctttcctatgaacgttctcgtgcctccactgcctgggtcttcagtttcacttcccagccctgcggggtacaggaaaccaccagctaacttaagtgcaaggcaattaagcggggagggaattgtggacaaatctatagaactctgaagccacaggtgagccaagcattgactttactggggaaaaaccaggtggaagaaggttgaaggagcttgggttggtcagaagatgccaggatttgggacctgagccagggaggtgggcccaggaagtgggattgggcttggggatggggaaggagaggaagctgagagcgataactagtatgcaatcagaaattttttttattcttagttttagcttctctgcctctgccaccaaagctttgttttggtttttgagacaggctctcactctgttgcccaggctgtagtgcagtggcacaatcttggctcacttcaacctgtgcctcccgggttcaagcaattctcccaccttagcctcccgagtagctgggattacaggtgcacaccaccactctcagctaatttttttttttttttttttttttgtatttttagtagagacggggtttctccatgttggtcaggctggtcttgaactcctgacctcaagtgatccacccgcctcagcctctcagagtgctgggattacaggcgtgagccaccatgcctggtcccaacctttccttaacacttcctaccacacagtacttaggggagaaagtcattagaaacccttgtacttgggagtaaaggccaggcttttagtagagacaggttgcctaccatgcccttgagcccatgcaccactgcgccgccctgcacctcagtttccccacttgtgaaatcctagcagtcttcctctgtaggtctgcactgctcccctgtggtgtgtcttttgtgcagcgcaggaggcagatgagagagagaagcccgcgtcttgtccaaaatatgatttggcgcattcttgggcagcgtctgttggaggtacaggcgggatgctcacaggtgaagtaaaccaggaatggcaaacagaacctgaaaggtggttctgaaagagagaatgcagaaactgggcaagcagtactcccacctgtaggaaggtttgctggcgaagtttcacactaaaacatgaaggagactgttaaaaacaatgggtatagatgacagaacagcatcccttcctaaacagcctttaaaagtctgaaactagggccaggtgtggtagttcacacctgtaagcccagctagttgggaggctgaggcaggaggatcacttgagcccaggaatttgaggctgcagtgagccatgatagtaccactgcactccagcctgggcaacagagcaagaccctgtctctacaaaaaataaattagccatgtgtaatggtgcacacctgtagtcccaggtattcaggggatcgagacaggaggatcacttgaagacaggagttcaagaccagcctggccaacatagtgagaccttgtttctgcaaaaaatttaaaaattagccgggagaggtgatgcacacttgtagtcccagctacttgggaggccgaggcaggaggatctcttgagcccatgagttcaaggctgcagtgagccatggtcaaaccactgcactccagcctgggcaacagagcaagacccatctattaaaaaataataataataataaaaacaaatctgaaagtaaagaagtaacaaccggtccccatttcctgccaggttgttgtctacccgtgattcctggcacagttggggcaagtccccggagtgcaggagccatgttgcctgcgtctttgtaactgtcccatggccagggggctcaatggatggcaggctgccggcccacgatgtcaacagcaggaacttgtgcctcagtttcctccatcacctaagtgtaggcctctcaccatgacagttcccttcctgggtcagatggtacttggggggttcccttccagaattcattttcttcccattctctgttcttggctaacaatctttttcttttttatgagacagagtcttgctctgtcacccaagctggagcacagaggcgcgatcatagctcactgcagcctccaactcctgggctcaaacgatccacccacatcagtctccaaagtagctgggaccacaagtgcataccaccatacccagctaatttttgtattaatgttttgtagagacggagcttcaccatgttgcccaggctggtctcgaattcctgggctcaagcgatcctcccaccttggcctcccaaagtgctgggattacaggtgtgagtcactgcgcctggcccaatcattttctgtgtcaaagaaaaacatatatatggtatattattttttaaagtcacattcttcttatagagatgtgctctttgtatacatttttttccccttggcaagtgggtaaacgggattccgggaaggtaactgtcttgactaaagttagcagagtctggcatcaggtggaccgcacaggacggccacttcttcttttgtttttttgttttgttttgtttgagacggagtctcaatctgtctcaccaagactggagtgccgtggtgcgatctcagctcactgtagcctccacctcctgggttcaagccatcctcctgtctcagcctcccgagtagctggaattacaggcatgcaccaccccacccggccaattttgtatttttagtagagacgagcctttaccatgttggccaggctggtctcgaactcctgacctcaggcaatccacccacctcagcctcccaaagtgctgggattacaggcgtgagccactgcgcccagccaggacggccacttctaatccatattcttttccacagctgcagccacagccatgcagcgtcctttagattctccttcttcttgagtatttttatgtcttgcttatcaccttgtttcattgcaaatggaatagtagcagtcagcatcagtgcacgctttacaattaatgagtgacgatggagggatacctgactactgtgatgctcttcactttttttgttgtcttattgggttttttgtttatgtttcatatgttaaatttccgacgtacgcgtgacctggtgtcagcatctcccgttcatggcccatcccgtctcacctgtccccactcctgttttgacttgaagctactcccagaatcctttcatttcctttctaaacattttaacacacatatcctcacaataaggactttctttttaatatagtcacagcgcaattagcacattcaaaaataatttttcacctgcagtcccagcaactcaggaggctgaggtgggaggattgcttgagcccgggaggttgaggctgcagtgagctatgatcacaccactacgctccagcctgggtgacaaagcaagaccctgtctcaaaaaaaaaaaaaaacagtaaaaataataatcataataattttttaatatgatcaggtaaatctagccagttttgaaatttctagttgcccccaaacttcataatggttttattttctaaaattattttaatttaggctgggcgcaatggctcacgtctgtaatcccagcactttgggaggccgaggtgggtggataacttgaggtcaggagcttgaaaacagcctggctaacatggcaaaacctcgtctctactaaaaacacaaaaattagctgggtgtggtggcacacacctgtagtcccagctactcaggaggctgaggcagtggaatcacctgaacggagaggcggaggttgcagtgagccgagatcgcaccactgcactccaacctgggcgacagagcaagactccgtcttaaaaaaaaaaaaaaaaaaaaaaatttgaatctcgattcaagtaagatccacacgttgcagttggctggtgtatctttaagtcttggtcattgtatagattccctcttcgtcactttttcttttccttgcaatgtatttgtgctagaaatggggtcatttgtccagaaaagattctccaccccactgctgagattttactgattgcctccccagaaatagtttatcatgctcctctgtcctcatgctttcctgaaaatttgtggttgaatctagaggcttgatcagattcaggctagaagtttttggccaaaagcccctttgtgggtgattgtgatgatctcgcgatggtgtcaggtactggaagtgagcgctcaccagaagagaaaggtcctgactttgatacacaatcataatgaatccaggcatggagcttggtggtttacaaaatcttttcctttctttttgtgttcttgttttatcctcatgctaatttctttgaatttcatggctcctcctgtataggtgactgtccagctcagaagtctgtccaaggtcaaacaactaaaagacaatgggagggccgggcgcggtggctcacgcctgtaatcccaacactttgggaggccgaggtgggtggatcatctgaggtcaggagttcaagaccagcctgaccaacatggtgaaaccctgcctctactaaaaatacaaaaattagctgggcatggtggcaggctcctgtaatcccagctactcatgagactgagggaggagaattgcttgaacctgggaggcagaggttgcggtgagtcgagatcgtgccattgcactccagcctgggcagtagagcaagactccatctcaaaaataaataaataaaaatttttacaaaataaaaatgcagtggagaagaattccaacccattttccaccagccacactcttttctgtagaccacaattttcctaatttcacttgattttaaagaacaaaggaacctgcacacccagcctgctctccacttctttgggtagagcagggctgttagaactctagagagatgcaggaagcagccgccgatgaacccagatgctcatccctggaggcactgtgcggtctcaggagcagaagccgaatgaattatgcaatatcagagcctcattccctgggccgcagctgtcccatgttccctgcctggagatgactgaagcccgagtgacagtcacaggctgttcccgatcacgctggggtcacacgctctggtgagcacccagccggccagagctgtgctattggtttggcacaggtagaaagttgaccccgcacgtgccgtagaaggtcatttcgttcggttcatcagctatactcggactggctaaaggaagattttattgaaatcgtttcccatgaacacgtcaacttgtggggcaggaagggaaattttcttcccgtttgggattgaaaagatgaggcttaaccaaactcgttcttatgttcgttggtttgttttttctttctttctttcttttttttaaacagactctcactctgttgcccaggctggagtacagtggcgtgatctcggctcactgtaacttccacctcccaggttcaagcaattctgccaccccagcctccttagtagctgggattacaggcgcacgccaccacacctagctaatttttgtatttttagtagagatggggtttcaccatgttggccaggctggtctcaaactcctgaactcaagtgatccacccaccttagcttcccaaagtgcttgggattacatgagtgagccactgcgcctggcctaaacttgtttttaatcattacttttgtatcatttaaattagtataatggtaatctacagagaacaaattctggttaatttctgagcagacagaggtgacatcctggccgtttaactgtctctcggcacagtgttacttccagcaaaaatgaaaaccgctatttccagaaggttatctgtagggataaagctccacagactggaccgactctctttccaggcctttgattggggaggggtggggccaccgtggagtgtgacacatttgatccggggcttggcagatgcaagatggcttcatcctcccctctacttctgccaaagcagaagtggtttaaccttgggtggaaaacgaaagatagggcaagtcatacagatgagggctgccaagaaaacctttccccgaaaaacactctctcctcccctcctccccttccccatcagcctccgtgtcttcagtcctgacctggttcacagatccgtgttgggcacggggatgagtgatgagtggtgagctgggccacctggttctgcactccaggacctcacggtccattggacaaaaagaagcctaattctgggtctttcaatacttctcccccaagactattattgccttgtttttcagaggctctgaaaagcgaatcattttccttctgcaataacatcttgtaggctctttccttaaaagttgtatttacaatttgccaaaagaattctaccctttctgccctttagaatactagccagtgaatggctgtctgtcaagaagacaggggacctcaggtatcacaggtgtcattaatttgcatatttgggccggtgcggtggctcatatctgtcatcccagcactttgggaggccaaggcaggtggatcactggagatcaggagttcgagaccagcctggccaacatgatgaaacctgatctctactaaaaaaatagaaaaattagccgggcatggtggcgcatgcctgtactcccagctactcgggaggctgaggaggcggaggttacagtgaaccgagatcgccccactgccctccagcctgggtgacagagcgagactccgtctcaaaaataaataaataaataaataaataaatttgcatatttggtcaaccagtattttgtgagtacctgctgtgttccctggaactatggcagtggataagcaagtaatcaatatatgaacaagagactttgagacgggaataaatgcaacagaaacaaaatgaatggacaatggagagtgtggctgtggagaggcctctcagaggagggccaggagggctgagacccaggcctgtaggtgggacaagcatggtgcttccaagaaacagaacaggactaaagaggctgggcacggtggctcacacctgtgatcctaacaccttgggaggccaaggcaggcagatcacctgaggtcaagagttcgagatcagcctgaccaacatggtgaaaccccgtctctactaaaaatacaaaaattagccaggcgtggtggtgcacacctgtaattccagctactagggaggctggggcattctcaagaatcacttgaaccccgaaggcagaggttgcagtgagctgagattgcaccagtgcactccagcttgggcaacagaccaagactccgtatcaaaaacaaacaaacaaaaaaacaaaaaacaaagaaatgcccatcttttattttaaaaatcttaataaaatagggatatagttggatatttcattaataaatgtatatatataatgtattttatatataactacacattaatgtatgtgttatatatatataatatattaatatatatatattatatattactcaagaacatgagtaagttcttgagtggtgatttgtgagatttaggtgcacccatcacctaagcagtatacactgcacccaatatatagtcttttttccctcacccccctcccaccctttccccgcaagtccccagagtcctttgcattttcatcgcttagctcccacttacgagtgagaacatacaatgtttggttttccattcctgagttacttcacttagaataatagtcttcactcccatgcaggttgttgtgaatgtcattaactcgttcctttttagggctgagtagtattctgtcgtgagataagaaatattcaaagggtgtgggaagagactctgccgtctttatttgcagatgtggtcacaggatgcctcgcaaccccgagagagccactgaaaagttgttacaaaattgaacaggcttccatttccctgtggcctctctctctagacagccgtacctctctatcccagtgtcccctgctcagtaaatctgtactcatcctccagggtacagactggatgtcccctactccgggatactgtttctcctggtgtctgcagaggcccttgtaccactttctgggatgtcactgtgctgaatcgctggtggctgccatttccttccgcctcccactgggtagacaggaagggggtccctgcccacccacccacccatgcccggtatatccctgctgagctcctaggatgtgcagggtgtattcctgtgtgctagcgagaagggagtcccagcgccactacgccattgcccactcctcccctgggacatttgtttcccttgggtgtggttcatggtaggtgccccatgggcgttattggtgggagacctccctgtctcagtctgagctgggcccatcgccatcagggcacgacagccacagcaggtgcctttgctgggagtaatcttgccctggctcgcatgagactgcagaccagcccttctccgtaagttcaggcgtttgtgctccgatcagcttttcctataggtttgtcccccaccccttgcccaactctttgaccccccgagttaaggggattccagacctagagccaagtgaccttcctcagagcctggccctgtctccaccgcttcagcaacctgctctttctggacagggtccagcgagccccacctctgtccgtttcctctaccccctgtgctaaggaagcctcacctgcagtgtaggttgtggtgaaaaatgtccccccttaaggacagagcaggtcatcacgtgcagccctggggtagaaggggagagttcgcttgatcaaacctaactggagcttttcttttaaagcaggaagaattaatctgtagatatttctcctttcaatgccaaagaactttatgatctggtattgagactattggtgggttttttttgttttctttgtttttttgttttgttttgtttgagacagggtctcgctctggtacccaggctggagtgcagtggcacgatctcagctcacttcaacctctgtgaccggggttcaagcgattcttccgcctcagcctcccgagtagctgggattacaggcgctcgccaccatgcccggctaatacttgtatttttagtagaggcagggtttcatcatgttagccaggctggtttcaaactcctggtctcaagtgatccacctacctcggcctcccaaagtgctaggattacaggcgtgagccactgggcccggccgagactattggcttatgaatcaagtctaagaagatacactagtctttgaaggccgctctgtatgtttttccaactgccttgtagatatactttgttttaacagctcgttttaacagctcctgatgccagcgtgcttatttgggtattgaaatatgcgccaacaccgtgccccgatgccacgcgttagcccccaggaggcttgcgtgaaagtaaatactagaatttccagcgtggatataatttcccttccatcgaccttgaccatgtccttttcagttcctcataaaaactgtgtgttagcccagagaataccctgaaatgatctgtggtgaactgattgaacgaactacatattctaggccaaactgaaattattcgctatttgaagtcagagctgagcataataccgggcaggttaatagatcagtggaagctgtttcgtcagctcataaaaacgtgagagatctaaatttttataataaatcattttgctgagcaaacaatatgtgcggttattacagactttggaaaataaatgattttagaccaatgtcaggctgcagatactgatgtggttagttgagccttcagcatgaagagaatgaaaaatctttggaatactgttgacactcacaccatgaaaccacatgccatttaattcattactgcgcttccaagattacatttacagttgtggtattaacccctgggcatttttgtattacttattgcagacagtttgtcaggcaggattaattcagtggggggaggaggcagcagtttggagagaaagtggatgattaagactggggtggggctgggcgcgtcggttcacgcctgtcatcccagcactttgggaggccgaggcgggtggatcacctgaggtcaggagttcgagaccagcctggccaacacgataaaaccccgtctctactaaaactacaaaaattagccgggtgtggtggcgcatacctgtaatcccagctactcggaaggctgaggcagggagaatcgcttgaacccaggagatggaggttgcagtgagctgagatcatgccattacactccagcctgggcaacaagagcgaaactccatctcagaaaataaaaataaaaatacaaaaattagctgtgattgggtgtgcctgtaattccagctacttgggagaggctaaggcaggagagtcacttgaactgggaaggcagaggctacagtgagttgagattgtgctactgcactccagcctgggcgacagagtgagactctgtctcaaaaaaaaaaaaaaaaaaaaaaaaaaaaaaacctggttgggaggtgccccaaagcaagacccgcctccttggtcctggtctgcaaacactgatggccacactcacatcttccaaagcccccgatcgcacttactcagctagttgtatttttctttcggcttttaaaaaagaatacctccttagaaaaattaataatgggccaggcacagtggctcaggcctgtaatctcagcattctgggaaactaaggcaggaggatcgcttcaggccatgagttcaagaccagcctcggcaacatagcaagatcaactttgtctctacaaaaaagaaaaaactagctaggtgtggcagtgcatacctgtagtcccagctactcgggaggccaaggcaggattgtttgagttcaggagtttaagaccagcttgggaagcattgtaagacccctgtctctaaaaaacaaatttttcttttaaattagctgggcttgctagtgcacacctataagtcccagctactcaagagactggggcaggaggatcacttgagctcaggacaagagttggaggctgcagtgagctatgatcgcaccactgcactccatcctgggcaacagaaccagaccctgtatcaaaaataaaaaagaattctcagaaaaatgagtaacaaacatacagatttttgtttgtttgtttttgtttgtttgtttttttgagacagggtctcactttgtcacctaggctggagtgtagtagcaccatcttggctcatgctcctcctgcctcagcccctcaagtagctgggactacaggcatgcaccaccacacccggctaatttttgtacttttagtagaaacggggtttcaccatgttggccaagctagtctcgaactcgcgacctcaggtgatccacctgccttgccctccccaagtgctgggattacaggcatgagccactgcatctggccgacttttaaaataataatcagagcgtttcctcgccaactgcatccctggttcctcccattgtctcctcctgtggtttctggtcccttctgtgaatggagacagcagcccctccgagcctggctgtcaccacaatccctggtatggaataggcctgccctgcaactgcagagtgtggtgtcgtcattgtcattcgaaagcctggggaaagagagttgcttttgtcatgaaaggtaagtgcagtccttgttatcacattcagtattttggtccgtttagcagttgcttagtaaccaaagcacaactgaccaggagatggaaaacttgaaattcacttccaggattgcctcacactgccaagtctgcaccttcccgcgtcagtgggactgatttttttataaatgatgtgaaatcttctggagatgaggcgtggttttccggatattcggtgtcctgatgaaaatccaaagccatgtgctatctgagaagaaatccagagagtgtgcactttccaggaggtgcccaagccccacccaggccccataaacctggcaggaactggactcgacccacatggaccccagccctgccaagccggcctctgtgtaaagctgggcccctggaactttgctcttctctatgcctgggcctttggccactggcaacaccaggtcgcaagtgaggagtggatgaaagcagccaggggcgggccagcacccccaggcagccacgcctccagcttttcagctccgcactcccaagatcagggagctgcacccagggagacggtgtcctcctgttgctgctgctcccggaagagtcaaggctaagtaagctacctggccagagggttttcctggttgccaagcagcagggaggagtcatcggcaaggcatctcagagatgggggccatccccttcccttccttcctatgttcggcagaaaggcattgaatgcctaccgtgtgtttttctccttcaattcgcttgagagacacgcagcagggctggcttctctgtcctcccaccgtgtacattgccagaaagagcggctggtatccctggaggacccaaacacacaagcaaaaacagctgggccccagaggagggcagtgcttctgaaagacacacccagaccccaacagtgggtgtgatatgaggcaggacagctgggccacaaagacaaagcaccacaaaggcactcagggaaacagaggaagatattggcagtgtgaagcgaaaccaacaggtaattttcaaatggaccaagtggaagtaacagcgtaaaaaaattgaataacttaggagcaaagaagaaaggatacattgccagctgggtctgatggctcatgcctggaatctcagcactttgggaggccaaggccagagggttgcttgagctcaggagttcgagaccagcctggcaacatagcaagaccccatctctataaacaaaatgtttttaagtaaataaataaaagaatcaacacaagcctggaaaataaagatgaagatatttcccagaaagtaactaaaaagatatagatgtagatgttagaaagaaaagaaaattagagatcaattcaggagctccaacatccacctaataggaattccagaaagaggaagtagaaaatagttcaggtgcagtggttcacacctataatcccagcactttgggaggctgaggtgggaggatcgcttgagcccaggagttcaagaccagcccggataacatggcaaacccccatctgtaccaaaaaaaaaaaacaaatagaaaaattagctaggcatggtgacatgcgcctgtagtcctagctgttagggaggctgaagtgggaggatcgcttgagcccaggagactgaggctgccttgagtcgtgatcacaccactgtactccagcttgtctccaaataaataaataaataaataaataaataaatagctaaagaccagttagatcaagttaaccttgatccagaaggcagcaagaaaaggataaagaaatagcaaaatataaaagaaaagttaaatgacatggaagacagaagtagctatgccaacaatatccaaataacagtagtctcaaacagaatagaagtattcaaatgaaaatagccagaattaaagaaagagagggcttatataggggcacactggagccattaggaaaagtgctcacctagacccacattcagtgtctcttcactcaccagccggaccagtccccatccacctcccaagttctgcagccagctctgctgatgcattcagaggaggatttaggcaattgtcaacctctgcacatcttgttgtgggtacgcagcagctatgtattttcattgtcatcttttaaatctatgacatagatgagatacgcaggacctaagcctgcatctctatgtgcccattccagcaccaggaaacttttaggggtctgaaacactagtggagctagtgaatgagtgaatgacggtagccagggcagttttgacctgtgtatgtggacattggaaatacacgataggtaactaactgaagtacaaaattgtgtttaaaacttgtgatttgggacaggcgcagtggctcatgtctatagtcgcagcactttgggaggccaaagcgggtggatggcttgagcccaggagtttaagaccagcctgggcaacatggtgaaaccttgtctctaccaaaaaaaaaaaaaaaaaaattaggtatgctggcgtacaccactagtcccagctactctggaggctgaagcgggaggactgcttgagcccaagaggcagaggttgcagtgagccaagatcacaccactgcactctagcctgggtgagagtgagaccctgtctcaaaaagaaaaaaaaaaacaacacaaaaaatccttgcaatttgccttaagtaaagtttgcaagcttttattttgtgtctgaaggagtttacgctctgaattcttcaacagggcgtcaaggtagcagctttctgcattgactggtgattatccttttctgatatgttttaagacccttaacacttttaatttttttaattaccatttgtagtattagactatctttgcacagcaatttttctgtcagatcttggaggtttcactttgagatgatacagaaggatgtttcatcatttaagaagccctgacccttccccactccctgcacccagcactgtattgcagaggcccagtttgggtatttatcttacagagacgctgccttcttcatgaaatcgtcctaaaaatagcttcatttaactaggccatttgacaggctttttcagactttttctcagaccagtctgaaagccggatattatttcaaacagatacaatgaacattgaacccgatcacaaggcatctgttaccctattcaggctgctgggagttgataagactacctcaaatcgctgtgtgtagttaaaggctgcaaaagcctcaggccacaaaaattccccagcccaggggcccggagacagtttttccaactctcagcgtccagggtgtaccttagcctgttttctgttgctgcaacagaacacctgaggccagggtgatttataaagaagataggtttatttggctcacagatctgcaggctgggaagttcaaggacatggccctggctcctggcgagggcttccatgctgcatcataacagtacggatagggtcaaaggggaggtggatgcgtgccaagagggacaacccagggaggttcctggcattatgataacccagtctcaagggaactcatccagtccctaaagtctggtcagagcaagaactcattcactgccaggagaatggcaccaagccattcatgagggcatccactgccatgacccaaacacctccctctagaccccacctcccaatgcccccacactggggatcaaatttcagtagcagttttggtggagacaaaccatagcagggtgggtgggtactctcacttggacgtgcctccttgggaccatggagcaggtttcggaaggatagaactctcattgtcaggcctgtccagcaccctgggctgtccccaggagtagacttgcccgtcacagacaggatgggccacatccaggactctggcatccaacgtgacgtgcagccctgtgaatacaggacaaattctagggatatagggcaaaagggacctatggcccagcattcagagagagctcacagcgtgggcacccagtgaaaactcaaacctggaaactaggactagggacagtgccacttcctgagacagagctgctgagagggtctgggaagggtggatggggtggaagtaggagatgaggttccctgggacgagaaggcattcaggcaggcggcgcaggtggaggcctagtgccgaggaaggcctggctctttggggtcccgcacgagatgggagttgttagagcacagggtcctgagaaagagtggcgggtaaggccaagaggaggaaggagccttggcatggaagggccttgcgtgtggctgagggagggattgcatcctgaaggcagcagagtgcaggtgcatgtggactcagagccacagcatgagagccctcaaccccaaccaggtccctgtggctgtaacattggctccatggcccttgggtatgctaaaaaaaaaaaccttccttgggtcacagacagttccagcctgtggccttctaacagagaccatcctcaggacctgcttgcagacattggggtggtggtctgcccgggtgtgctgctctaacctcccataggcttttggagttggccgtgcccttctcaaaaggactctccaggccgggcgcggtggcttatgcctgtaattccagcactttgggaggccaaggtgggtggattacctgaggtcaggagtttgagaccagcctggccaacatggcaaaaccttgtctgtactaaaaatacaaaaattagccgggcgtggtggtgcacgcctgtagtctcagctactcgggaggctgaggcaggagaattgcttgaacccaggaggcggaggttgcagtgagccgagatctcatcattgcactccagcctgggcgacagagctctgtctcaaaacaaacaaacatacaaacataaaagcactctccgcattcctctctcatgatgctctgtgttgggttcgcgtatttgccttcagattactcaaggaagtactttcaaaacagaaaaagggaaagacagaacctggacaattgcttttacgaccaggctgggccatagcaatgaacccaggctgtctgcactgcagcctgtacagtcccccaacctgtgtcaccatcctcacctgccctcctcacctccagttggccaccttctcctggtttcctcattcctggtgaggctttcactgccaagtgccttttcctaaagtagcctttccccagctcctcctctcacccccagcctggcaaacttctactcatccttcaaaaccccacttacctgtcacctcctctgcagccttccttgattccctcccacaaagagaatttatttctccctctttttttcagagcactctgctcagagctctttttgaacccttggcaggacatgctgtattttatatttttatggttatgtctccccaatgagattgggaccccatcaaaggcaggcaccccatacgcaccagacacatgattatcaaaagagcgcatggcatcagcaagcacatctcttcccccagtgtgagcccacctcctcctgctggacagcattgactcacgggtctgcacagcccttcccgagccctgagctaggaagctgtcccatcagtcaccccctgagccggtctccttgtgactaacctgctctctccctctcaccctcctagggccgacgagattgaaatgatcatgacggaccttgaaagggcaaaccaggtaggaccctggacgcttttagtcctaaaacccacaatagcgggcccgtttctggcatctcggaagatgcgtcacccgaagttagaaggccggttatccttccattttttactgacagctttcaacgtcgatgctccttctgttgtcatgagaagtaggaaaagacataaaaagtcctaggaaccatttccttggcaaagtctttgatgtggttccaacatctcagacatcccatggtgaacatcccctccaaagtggtaactgtctccttttccctactccatctctaaacacccgtctttgtagctgtggcatccatgacagtgtagacatctcaccatggaattatcctcggagagttccttagtgtagacatctcaccacggtgttatcctaggagagttccttagtgtagacatctcaccacggtgttatcctaggagagttccttagtgtagacatctcaccacggtgttatcctaggagagttccttagtgtagacatctcaccacggtgttatcctaggagagttccttagtgtagacatctcaccacggtgttatcctcggagagttccttagtgtagacatctcaccacggtgttatcctaggagagttccttagtgtagacatctcaccacggtgttatcctaggagagttccttaccgccacgttctcatgggtcgcagccacttgctccaaagagggctctcagctgacggcccctttttggctgacacttggtgctcagagaggccttatggcaagtacccagcacagtgtccggcccagatcaggcacaggacgcatcttaaccattagcgtacttttgggtgattctaaatactctgcttcctggaaaattcagccatccccaaaaccccttcctccccccaggagcccacagaacaggaaaacattttgctttagctggtgctgctgttgctctgaaaagaaagtggtcccccagccgggcacagtggctcacgcctgtaatcccagcagtctggggggccaaggtgggaggatcacttgaggtcaggagtttgagaccagcctggccaatatggtgaatccccgtctctactaaaaatacaaaatttagcaaggcgtggtggcaggcgcctataatctcagctactcaggaggctgaggcaggagaatcacttgaaccctggaggcagcagttgcagtgagccaagatctaagcctgggcaacagagcagaaactccatctcaaaaaaatacaaaataaaatttaaaaataaatttttactacccagccttgggctgggtgtagtggctcacgcctgtaatcccagcacctggggaggccgagatgggtggatgacttgaggtcaggagtttgaggccagcctggccaacatggtgaagccccatctctgctaaaaatacaaaaattagccgggtgcggtgacatgcacctgtcatcccagctgttcaggaggctgaggcaggagaatcacttgaacccagaaggcagaggttgcagtgaaccaatcatgccaccatactccagcttggatgacagagcgagaatctgtctaaaaaaaaaaaaaagcagttactggaaggagttaccttcatcatagatcactattcctatttctcaagtttccaccgactccacctctctcctcaaggccagtcttgggcatgccttgcctttagatggcactttagggcaatctaatgtgcccaacaggagagcctggtttgttaaacgggagagccttatcctgtgaatatcagtgctctatccagaacaggttctctgtggtctcagaggcagtccccagctacctaagaagtttggcaaagcgaatgcacttctcaaggtgccaaagccactcggtggaccccagtcttaggagacaccagacaaggctgtagggacaggtgctggctccgcaatgacacgggttcagttcctaactcggtatttcctgtgtggccttgacgggtctcttaatctcttaaatttcttggtcataaaaaaatcaaaagaaaagtgaaccttgaggccattatgccaggggaaatacgccagtcacaaaaaaagacaaatactgaatgattccacctgtatgaagtatctagaggagccaacttcagagagacagaaagtgccacggtgactgccagggacgaggagaggagggaaatacgaagttgttgttaaatgggtacagagttttggttttgcaagatgaaaacattctggggattcattgcacaaccacgtaaacgtccttgacgctactgaaaagtacgctaatggttaagatggtaaattttatgctttgcgtagtttgccacgatttaaaatatgttaaaaaattttttgaaagaaaggaagggaatttagctaatgcttcctttgcaagattgtttcgaggatttgaggtaaaatgccagagtaaaaagtagatggtggccgggcgcagtggctcacacctataatcccaacacttggggagaccgaggcaggcggatcacttgaggtcaggagtttgagaccagcctgggcaatttaacaagtcccccatctccataaaaaatacaaaagttagctgggcgtggcagtgtgcctgtagtcccagccactcgggaggctgaggcaggaggatcgcttgagtccaggaggtagaggttgcagtgagctatgattgcaccactgcaccccagcctaggtgacagagtgagaccctatctcaaaaaaaataaaagaagtagatgcctaaataaatgttagttccgtagctgctgaagaagctcaggttttgggggaattgtaaagtcctgccttcaggaaagggtggtgaggggtagaggtgagttctcaccaacaactcagccagagtttatagcctgatacggctacattaatagaaatacagtttctagaatgaaggaggtggtgattctgctcattggcagcaaggagtccgtgcctaggaaattccattttttaaatttatttatttttcttctttgaaatggaattttactcttgtcatctaggctggagtgcaatggcacgatctcagctcactgcatcctccacctcatgggttcaggcaattctcctgcctcagcctcccaagtagctgggattataggcgcccaccatgcccagctaatttttatagttttagtagagacggggtttcaccgtgttggccaggctggtctcgaactcctgacctcaggtgatctgcccaccttggcctccctaagtgctggggttacaggcaagagccaccgcgcccagccggaaattccattttagactggaagccacagtataaggaaaacagctccttggagtgcattcagagatgactccatggccaggacagggaggggctctaacataaaaagaactagggggttcggagacgttcctaatcttggggtagcagggaaagacggcagcaccactggacagcaggagcaagaggaataatttcaggaatctgggacgcgaaaagataagggggaagggtcatgggggcatttgtgggttctgtccttgtagttctcaagagccgaccagaaagaaaggccaggggacggagccaggctttttctgagagacccctgtagaccccagccaagcatagaggctggcgagaggaaacttttttgtttttgcttctgagacagtcttgctctgttgcccaggctggagtgcagtggcacaatctcagctcactgcaacctccccgtcctgggttcaagtgattcccctgcctcagcctcccaaatagctgggactatgggcatatggctccccatcctgggttcaagcgattctcctgccacagcctcccgagtagctgggactacgggcatatggctccccatcctgggttcaagcgattctcctgcctcagcctcccgagtagctgggactacaggcatatggcaccacgcatggctaattttcttatttttagtagagataactcctgggctcaagcgatctgcccacctcggcctcccaaagtgctgagattacaggcacatgccaccacacccagctaattattgtgtttttagtagagacggggttttgccatgtttgcccaggctgctcttgaactcctgggctcaaacgatccacccacctctgcctcccaaagttctggggttacaggcatcagccaccatgcccagccaggaagcttattcccagtggtctggctctccagagttgccacgctgaaagatgcttgctctggagagagtgagctccctgtcaccagagctatgcaagcagattcaggccagccctcccagagagcatgagatggggaatcacgcacagagtggaccgaaggagggattgaacaagaaggctcaaagggtcccttttgaccctgaagtctaggatttcgtgaagctacaggtgaacccattggcatgagaagcatccagggaggaaagatgcaagcccttggaatatcgagagaatatttccagcaggaaaagaagtggaaggttaaaggaaagccagagaaggggacgttgccctgggccatcaactaagagaaaagctgcccagagccaggcatggtggcggcggtgcctatagtaccggcagttggagaggccgaggcaggagcatcacttgagcccatgagtttgagaccagcctgggcaacatagtgagacttttttctctacaaaaaagtttaaaaaaaaaaaaatagccaggtgtggtggtgtgcacctgtggtcccagctaacccaggaggctgagatgggaggatctcttgggcccgagagttcaaaaccaacaccagagatgcgggtcagagagtgggctggtaggacgggacctggccaggcctgtgggagggtctgagtatgaaggattcatcctgggagcagtgaagaatcgtaggcgggattgagacatcaggtttgagttctagaaggatctctctggctatacattggagaacagatgggagtggaaagaccagaagccaggagagctgtgggaggctattgtgtaagtatggggagagatggcatgggcctgagctgaggccatccctgcggaggtgagctggaggcgggctgggcaggaagaggagggcgcagacacagtccaacactggtgcaggtggcaggcatctggaccaacacctttcccatcaggaaaccccccaggaggagcaatttactagctcactggcatacaacattcgttttccctgggtgtgtagttagaatgttctacggagacctgaagtgctcgtttattgctcaaccactgtgctcctgttatggagaagtagcagaggggtcggcacctgtcagttatgtccgagcctcattcacacctgtttgttgaacatcagggcactggcataaatactcactgtcccaattggtgacagtaaaggatcagatctcttgagacttcatggtcaataagaagccacagctttacactttgaactgcatgtgaaaccccgtcccgtccgggggctttcagcaattcacagcctttttgtggtgaaaaaaagtggcccgcccaccacccctccggggcctcctttctgagcagtggtgatccgagttgctggtgggtctcaaactcctgggctcaagctatcctctcgccttggcctaccaaagtactgggactacaggcatgagctactgcgcccggctttgaagccagcatttctttactacctacgaggcctgctcagagtccgtgctcaaaaagatgtattgaatgaatatgggctttgacgcacaggctggagcgcagtggcatgttctcctagcccacagtggggctgggagggagtcattgaagtgagctgccctcttcctgttcacctgcctggtgtttatgtcacaagactgccctagtggaggactctccaggttgaggttaggggttggaaaccacagctgaccctcaccacggagagtgggtctccatggaggccttggccactggtgcagcatcagcgtgggacacgtggtggtcagcatttggtctccagctgtggtagctgttcccgacctccttcctgcagagtcagtgacatggagttacctctgggagtcgagatgttcactgtaattgcatgctgcgggtagggcagcagggccttagcccatcatcagctcctgggtctactttgttcctcgggggacttgctcatctctggtgtcctcaagcctgagttttaatggccatgcaagcagagaacaagagacaaaacctggggccaagaagggggtggaagattggatcagagaaaacccccctcccccgccatataaaaccagggacttcaaaggccacactctgaaagtgtaaactggcagggtgggggaaggagtctgcccttaaaggggagacggtgagggttctctcttgttggttccagagggagaagaaaatgagcctcccaagagaattcctaaccacagccacctctccacaggtctggggccatgtcgcacatgagaccccccagccctctccccacaccttcgccccaccaggctgcagctggcccaaggccctgtctttatcctctgcaagcccacccctctctgtgtccttcccatgatgccttaccacgttttatgagtcaaattgttcagactttagaggcctggaagtagctgtctacatcctgtattcacatcccaatcgggcactgcggttaggggaaagcttttttttttttttttttttgagatggagtctcaccctgtgacccaggctggagttcagtggcgtgatcttgactcactgcaccctccccctcccagattcaagcaattctcatgccaattctcatgtctcagtctcccaagtagctgggactacaggtgcacacccccacgcccagctaatttttgtatttttagtagagacaggatttcaccatgttgaccaggctggtctcaaacccctgacctcaagtgatctgcccacctcagcctcccaaagtgctgggattacaggcgtgagccacagcacccagcaaaagcatttacttaccatccttcctggggcctttcagggacccttgagggatgggcaggggttggggggcccgtggaacttcttctaggatgaggtgacctcgtggacccctggttccggctctccttccccaaatcacccagtgaggaatatgacaccagcccagggagcagaaaagcctccttcaccttccccagagaagcgaggctcccctgggtctcacggtggaaaccatctctgtatttgctggcttgactctaacaggaagaattcctgagacacggtgtcgctggctgcttgctacctcccaggtgactgctgaggggaggcagagtttaacctgatgccagctaagagtaatttcccccaaaagggtcttccattttgagatgaggaggatgtgaggtgtgcctggggccacacatgccagggaccttcgtgacaatgtcctggacaccatcgccaggtgatgggcatcggcttgtgtgagccccgtggccaccagtccccttgccgggtggctgttttctgccatcgtggtctgggttaccactgatatgcaagcagtatcctcctcgcccctgtgtttctagcatcaactctgatttctcagcaaatgacagagaatagacaagaaagagcaagaaagatctcccaggacagtgctcaggcttggcgaggggccgttctcatggtggggcagacacaaaagtagaacgagggctcccagtggccctgtctctgcagggacacaggaggagacgggagtccggcggtgaccacagggaagtgatgtctcagggccgccaccgctagatctggggttccagatctagaaacacagctacagctggtttaacaggggtcttcaggaagacgccagagcctcaaaaccagtgtcaccacacgccgacccgggacagggcccccttcttcctgcctcagctgccaatgatgggctacgcttacttctcagctcctgaaatgaatttatcccagctccagatcagtgtctgtttccctgttccttcctttcactgccattaggcctgtttttagtttgaattctcctgtttcgtggatctcaccacacaaaccacctcaacgcttcattttgtgagttttgtattttttttcgacgccctcaggacagaaatcctgaataactatgtgatcagaaagttgcgtgaaagtaacgaaggcaagccacaagtgatagaagtctgacaccgtgaccgccaacagatgggccacagagagactgtccgtgaacttggaaactgattgcaagtgcaaatgctccacagaaattatgcaatcaggccgggcgcggtggctcacacctgtaatcccagcactttgggaggccgaggcaggtggattacttgaggtcaggagttcaagaccagcctggccaacatggtgaaaccctgtctctactaaaaatacaaaaattagctgggcgtgatggcgggcatctgtaatcccagctactcaggaggctgaggtgggagaatcacttcatcctgggaggtggaggttgcagtgagccaaaatcataccgctgcactccagcctgggcaacagggtgagactctgtatcaaaaaaaaaaaaagaaaagaaaagaaaaagaaagaaattatgcaatcagaaattgaaatcatcaacagctagatcccttcttttgtgaaccatcaccctgtgatgagatggtatccgctctgaacggctaaatgcctgcttgagaccatgtaggctcccggggacaccttgtaaccagatgcccgggacttccccagcgctggccgttccagaacacttcagagccagtgttacaagtcagggtggtgaggccacctccttggctgccaccagaacagcttctccactaggctaagaaataggttttctagcccaagagaccaggagaaatatctccaaatacatcttattccaggcagagtcttagatattttctgcccaagagttgaactgaccagcaagggaggcgtaagctcttcagtgatttgacgtgatcatcagaaacacttggcatgacacatctggaaataaactgggaaaaatcttttttgttgaagaggacatttttctgtagtcttaatagttgattaggtcggatgcagtggctcacacctgtaatcccagctctttgggaggccaaggcatggatcacctgaggtcaggagttcaagaccagcctggccagcgtggcaaaaccccgtctctacaaaaaatataaaaatgagtcggttgtggcattgtgtgtctgtaatcctagctactcgggaggctgaggcaggagaatcgcttgaacccgggaggcggaggttgcagttaactgagattgcaccactgcactccagcctgggtgacagaatgagattccatctcaggaaattaaaaaaaaaaaaaaaaccagttgattaattagcatgaaccagaaatcacctctacagtcctggacatacaggtcaccttgccaccttcctgatggctggttctagattcagtgtggacgagagatagtgacagaggtgacctgcttgggcctagacacacccacccaggcaccacatgaattcaactgaatgtaattccaagagctcctggagaggcaaggcaggcggccaccagcaccgccctgggcggacggaactgccattagaaatatcctaaattggctgggcgcggtggctcatgcctgtaatcccagcactttgggaggccgaggcaggcagatcatctgaggtcaggagttcgataccagcctggccaacatgtgaaaccccatctctactcaaaacacaaaaattagccaggcatggtgggcacctgtaattccagctactcaggaggctgaggcaggagaatcgcttgaacccaggaggtggaggctgcagtgagccaagatcatgccactgcactccagcctaggcgacagagcgaggctctgtctcaaaaaaaaaaaaaaaaaaaaaatcctaatttgtctgtatgcagggcaaatagattcaatgctgttgccacagaattgcttaaagctgccaaagccactcctcctagaactagattaatcagccagttccaggacaggccaacttcttgtttgtctttctgagtcctttctcagccattgttagccacacgctgccatgccacaaaataaaacacacgatggagacgctgcttggccaggcttttcttttcttttcttttcttttcttttattttcttttcttttcttttattttctttttttttttgagatgtggttttgctcttgttgcccaggctggagtgcaatggcgtgatctctgctcaccgcaaacctctacctcctgggttcaagcgattcttctgcctcagtctcccgagtagctgggattacaggcatgtgccaccatgcccagctcattttgtgtttttagtagagacgaggtttctccacgttggtcaggctggtctcgaactcctgacctcaggtgatctgcccacttcagtctcccaaagtgctgggattataggcgtgagccaccgtacccagccaattttttgtatttttagtagagatatggtttcaccatgttggccaggctggtctcgaacccctgacctcacatgatccacccgcctcggcttcccaaagtgccaggattacaggtgtgagccaccatgcccagcctttggccaggcttttctgattgaatgtttctagcagtggaatgtaagtctgggaggaagaagcagaactttcacctcagcccacgtgtcccatgtcattcgccaccatctcccacctgtcttagaactgtgcctcagtcctaagtattaagccggcacaaggccattcacaaacgacctctgcctgagttgtgtgtcctgggcacttccgtggctagggaccgtgttcccattttccagacgggtaggcagcagctcagtgagtttgggtaacttgccatggtatgtcttttcccagacaccctgtcgggtggtgggcactggggtgacctgtcctcgtcatccagtgggaaatccccatctgctctctgggggtggttgtttccttgttcaggaattgcaggcaaatgatggaaaagtccactcatttgtcccgcagcccccagcactggtctatgctgtcctgtctacgtcctcggattggcctggttggctgaaaatgccaggatcagcattcaaaacactttgtccagtgaagggttaaatatgttgaaataagcccggcctttacaaaagcagtggcatttacatcctgtacgtttatggaaatccttgctgaagaaaaacaaccacaacattgtttgtgcgtgtttttaggaagagaatggccaaagtgtctttaattcactgtttacccgtgagaattactcccaggagtaatcccgcaataaaatcttcttggtctatgagaatagaaagaaattgaatcaaaagactcgatttccacttgtatttattcagtctgggaaattcagtgggccggagtattagtatcagcaggggattcctttgctcctagcgttaaattactgtcataatcgctcaattatttcttccttgtactgtttaaaataaaaatccatcacattctgtgttttttttcctagcatttattaggttgagtgtttaggaaaatcaattatagtcagtcaggcatgaattgatgaatgttcttgtaataattgtcagttgttaaactgaatgtactttctctttcaccccttttcatttccttcagagggcagaggtggctcagagagaggcggagaccttaagggaacagctctcatcggccaatcactccctccagctggcctcacagatccagaaggcaccagacgtggtgggtagccccggccccgtgggggactgtccccgcctggcctccgcaccttcgagttacagccgcttgctcctttttgttttcagcatctctttttgggaatcacgttttaactagtactgctttctcggtggggtttgctttgaccaattgggggccggagcttgttaaagtcgaaggaagagctttgctaactgtgcgtgggtgggctgaggctagcgtggcatccacccagggccaaggtggaggctacgcaggcacagtcacagacacagtcacgatgccccagccaggcctgggggtgtgatcgctggcatgcgggtgcagacccgaaccaggagcctctccagaatgacacggagaaattgagggtttccgctgtgcctttccaagatgaggaacagttcaggatgagctgggagggtaggggtgggcgggcagagaggtaataaaataacattctgcaccgagtttatagagcaggaagagtgggtatcacaccacttttttgcagcttgctttttctgaaattagcgcaaatggctcttagcccaaacattcccagctcgatcaaggtggctttgaactatgggtttccagactctctttcaatgctgtatagggacaaggaacagcgtaggagctaagaccttgggtgttggagccatagcccccagtgcagaccccagctcagcagtctggtgatggggacaaaggagcttaacgtccctgagtctccgtttccccgcctgtaaactggggggttggtgcgaaagttattatgagcaaataacttagagcaaagctggacatgtaataagactaagtaaaccttagcagtaattctagttgtagttggcaccattatctctgatccctcagttttgggttttttttttttttctttttttttctaagacaaggtctctctctgttgcccaggctggagtgcagtggcgcagtcttggctcactgcagcctccacctcccaggctcaagggatcctcccagctcaacctcccgagtagctgggactgcaggcgcacaccaccacacctggctgattttggtattttttatagggactaggttttgtcgcgttgcccaggctggtctcaaactcctggacttaagtgatcctcctgcctcagcctcccagagtgctgggattacaggcatgagccaccacgcctagcctgatccctcaatttctagcacataatttcatcactagttcacttacaaacctcagttttcccatgtgtaaaataggaattaagtgatcacaaggccgctctatggagccctcatcctaaggttacaatgagtacatatcagttgtaggagtccttttatccaacagtgactccgtcaagcccttgccgtatgctagggcttgtagtggacacccgaagaaccataaggagtaagatgaggctggttgcagagagtacagtctcatcagaagaacttgctcttgtaataaattcaatcattgacaatcattatttccacccaatctgtgaaacagaataccgttatttcttttttttgagagagagtcttcttctgtcgcccaggctggagtgtagtggcgtgatctcagctcactgcaacctccacctccacctcccgggttcaagcaattctcgtgcctcagcctcccaactagctggagctgcaggcgcataccaccatgcccagctaatttttgtattatttgtagagatggggttttgccacattgcccaggctggtcttgaactcctgtcctcaggttatccacctcccaaagtgctggggttacaggcatgagccactgcgggatctcactcggtcacccaggctggaatgcagtggagtgatcatggctcgctgtagccttgacctgggctcaagcgatcctcctgcctcagcctcccaggtcttgaactcctgtcctcaggttatccacctcccaaagtgctgagattacaagcatgagtcatcattcccggccctatttttttatatagatgaagaaacaaaacctccatgaatgtaaacaccttttcccaaagcacagtcaatctaatggctgagctaagacctgaattgggcgttctggcaccccagactgtggcttttaaattattccccaggaatgaatctagatcaaggtattaagactcccttctaagaaaagattttagccttctttttaaaattaacattaattaaaacatttgttgctgggcgcagtggctcacacctgtaatcccagccctttgggaagctgaagcaggaggatcacttgaggccaggagtttgagaccggccagggcaaaatatcgaaaccccatctctacaaaaattttaaaattagctgggcatggtggtatgtgcctgtagtcccagctactcaggaggccgaggcaggagaattgcttgaacccaagaggcagaggctgcagtgagttatgattgtgccactgtgctccaacctgggcaacagagagaaaccctgtctccaaaaaagtaaatatgagactgggtgtggtggcacacacctgtaatcctagcactttggggggccgaggcgggcagatcacctgagatcaggagtttgagaccagcctggccaatatggcgagaacctgtctctactaaaaatagaagaattagctgggtgtgatggtgggcgcctataatcccagctactcaggaggctgaggtaggagaatcgcttgaacctgggagacagaggttgtgcagtgagatcgtgccattgcattccagcctgggcgacagcaagactccatctcaaaacaaaacaaaacaaaaaaagatatgattgaagtgttcctggatgtagagaaaagatttgcattgagcaggccatcacgtccttcatacttcatggactctggaacttaattttaactgaatgtccccttggctctgttacagttccttcctctaagtttagacaaactggatccagcaccatggctagggtgggaggcagccttcaggacagggtcagcggcttcccctggcccctggggtcctgcttcattctgcaaaggaagtcgtccattctgatgtgtctacacggggcccctgagctcagtgttttggttgaaaagaattctggcactatcctggactgcagcaaccaaaacatttcagaaggaaatgaatgtttttgcaggtagagtccgttgtggatcctaggggcgcttaaacacttcatcatcggttaagtgccgtgtttacatggcaccggttcagtctccccagagcagccccgtggggctccccgcgggcgtgtattcccacatagccagtgggttccagctgcagccagttggggagcaaacataggaaactgggccagcggaaaaatggtctgttgggcttggctggcagaatgcagcagagaaacggtggagtctgtagatctagcaaaggccaaaacccatccattgggtatcccagtggaatctccgattctagaaggtgagcggtcactgagtgagctgctggcccaagtttgcagccatgctgggctttgcatagttttgtttgtttgtttgttttttagtgagatgtagccccgctctgtcacccagggtggagtgcagtggcgcaatctgggctcactgcaacctccactcctgggtttaaccaattctcctgtctcagccttctgaatagctgggattacaggtgtgcgccaccatacctggctagtttttgtatttttgctagagatggagtttcaccatgttggtcaggctggtctcaaactcctgacctcaggtgatctgcccacctcagcctcccaaagtgctgggattacaggcgtgagccaccgcacccagcctccctaaagctttgaaggccacctcttcctctctctgatttcctctctagcttttgcccatgtctctcccagccatcaccctatggactgacaggccgctgcttctcatccaggccccctggatcgctccccaagcccctctctgtttctttcttcattctcccttatgtccttgtgacagcacaactgggagtgcccactgtgttgagatggagtgagccacagtttcagataaaggaaggatgggccaggcgcagtggctcacacccataatcccagcactttgggaggccaaggcaggcggatcacaaggtcaggagttcgagaccagcctggccaaaatggcaaaatcctatctctactaaaactataaaaatttgcctttgccaggcatggtggcatgtgcctgtaatcccaactactcaggaggctgagacaggagaatcgcttgaacctgggagggggaggttgcagtgagctgacgtgacaccactgcactccagcctgggtgacagagcaagactccatctcaaaaaacaaaaacaaaaaaaacagatagagggaggatggtcatgtctgtgtcatttccaaggtcttactgctttggggttcattttcacctcatttagttcgtgcgagacagcgatgatttttgctgttttatgaaggaggagtttgtggcttgagttgctgggagttggccagtgtggccgagctcttgtggccatgcccagccgggcgcaggagttgagccctcgaccacccgctgcccggtccccactctgggtccagggacagcactgaaatccacacctttgacctgtgtcactggaagcacctgtcccagatacattcactttgacttgcgccttgtaaaacccacattcccttggctggttttactgacccttttcgtaaaagccctttaatcagtgtctatggccagcacccctcagggtggaagattaagatgaagacgtgatatagcatgattcaacctgtgcccagactgacctccctacatgtcacttctgccatgtcccctccttgctccagagctggcagggactccccagggctgccaccacatgtccaggcgcctctggctacccctggcagctgtcactcctccagccctgccccacactcctgccagcctctgcacctgcctgcatgtcctccgcccttccccggcacccaccctgagatggagccccctttccttccgacaaggtcccgccagccctcccgaggcccacccattcccccctcctgtggctcagccccacgtgccactgtcctggtcctcctaccctggagggctcgtgacgttggccctgcccggcattattcagagcggtgctttccagactccctgtgatggacagttttgttttgttttttaaatttccagtctgtggcagactgatcgttttatataaaagacatttaaaatgtcaccgaaatgccgaatcgctataaaagtttctaaacacttattctcgatttctgtaattgcctcactgtgcaccagcaacagtttgcaaattggcaacgatccctgcagctcacgctgcacagaacgggcctggacagcctgtgcctggtaaataagccgacaggagatgctcgctccagccccccagggccacgcgcacagctgtcagaggtcaggagaaccgaaacacctcttttacaacctcatacaaatcaaagaagcaggaaggagtaccctctttgcacacaaaactttacagacttaaatggtaaaggcctcattttccccgagggagatataaaacattatttccctgagtgaatgcctgcctgtccccaaatttgaaaatccgtggtgagcacacggtgcatgggatggcccagctgtacctgccagctggggccacggtgccaccctttccccacaatacaagcaagatcaggacgtgaaactgagcacttcagaggggggacagcggcaaggacagtggctttctgtgttacagcatgagctgcccccaggattcggctgtcatagacaccatgcagctctgccctctccacccctgtccccgtctgtcatgcccagaattgcatctgccctgcagaaaatatttcagaatctttcaggagccaggattcctttttttttttttttttttttttttttgctttgacacagagtcgctctgtcacccaggctggaggtcagtggtgcaatcatggcccactgcagcctcaacctcctcaagctcaagcaatcctcccgccccagcctcctgagtagctgggactataggcatgcaccacaatgccttgctaatttttgtatttttttgtagagatgggttttcgccatgtggcccaagctggtctcgaactcttgagctcgggtgatccacccacctctgcctcccaaagtgcttggattacaggtgtgagccacagcacctggccccgtgattacttttaaaggttgaaaaaagtactacttgagtcattgagaagtagaattacagatttgactttttcctttttttttttttaataccttagcttttttctattttgcgtattttccacaatgagcatttagtgaggttaaggggtgggtagccaggtttttttcacatcaattatcctaagagttcttcaacaaaggaacaccaaatatacattttccacatcttttaattcttttattaaataaaatactggccgggcacagtggctcatgcctataatcccagcactttgggaggccaaggtgggtggatcacttgaggtcaggagttcgagaccagcctggccaacatagtgaaaccccatctctactaaaaatacaaaaatgagccaagtgtggtggtgcccacctgtaatcccagctacttaggaggctgaggcaggagaattgcttgaacgcaggagacggaggttacagtgagccgagatcgcgccactgcactccagcctgggcgacagaccaaaactctatctcaaaaaaaaaaaaaaaagaaaagaaaaagaaaatgctgatacagagttttcaatttgtcagacaatatctcagcttccgggtaatttaacagtgaatctcaaggaccttgaatcccaccttgtggtggaaaatctcggtggtttgggagcattggagggaggcttcctcctctgagccacccactctgctgttcccctgcctggagcactcttccctcttccccaacgctcagcagcccctccccacctcctcctcctccaggtctctgctcacacatcaccatctcagtgagtcttttcctggccatcttactaaaccccctgcctctcagctctgactctggcctctgttttaagtctcctttgacagtggtcaccccgcacacttttcattactaataagtgtattttctgcatctcactcatcctgccgcatccctgctgggctgtaagccctgggaagacagggacttttctcctgtttttttttgtttttttgagacagagtctcattcctttgcccaggctgaagtgcagtggtacaatctcagctcagcgcaaccttcttctcccgagttcaagtgattctcctcctcagcctcccgagtagctgggattacaggtcaccaccacgtgcctataattagcccagctaatttttgtatttttagtagagacggggtttcaccatgttggccaggctggtcatgacctcctgacctaaggtcatccacccaccttggcctcccaaagtgctgggattacaggcgtgagccattgcacccagcctggactttctttgattcactgctatatggttggtacatggtaggcactcagtacatatttgtccagtgaatgaatcgaggtggcagctaaccacagggggaggaaggttgcataggggaagtgcaagcaagggcaagaagtgacatcctgccatcaccatccacacactgacatctgtgcagcttctgtctcagttgccagcacaggtagcctcgagcacccgcctcaaggccagcgcagttttgtcatctcttttctcctccccaggagcaggccatagaggtgctgacccgctccagcctagaagttgagttggccgccaaggagcgggagatcgcacagctggtggaggacgtgcagagactccaggccagcctcaccaagctgcgggagaattcggccagccagatctcacagcttgagcagcagctgagcgccaaaaacagcacactcaaagtaagggggctgcggggcccgggggtggcccgaggaggcagggcggatggctggacacacgcgcacacacacaccctctgcctttctggacttgatagcaagtgtggcaaccttgaacctctgtaaagtagcaccaagcagagtcccggagtccatggcagggagactggatgttaaaccctggcatcagcccttgtgtaaacagcatttccctctttttttttggagtcggagtctcgctctgttgcccaggctagagcacggtggtgcaatctcggctcactgcagcctccgcctcccaggttcaagtgattctcctgcctcagcctcccatgtagctgggatcacaggcgtgcatcaccatgcccggcttatttgtttatttatttattcattcatttatttttgagacagagtttcattcttgtcacacaagctggagtgcaatggcatgatctgggctcacagcaacctccacctcccaggttcaagcgattctcctgcctcagcctcctgagtagctgggactacaggcgcctgccaccacacccagctaatttttgtatttttagtagagatggggtttcgccacattggccaggctggtcttgagctcctgacctcaggtgatctgtccacctcaggttgccaaagtgctgagattacaggtctgagcctctgcacccggctctttaactgagttttgcagggcatcctagctttctgaggatacccctacaggaggagctggtgtactataactccagcacttccggtgcatgagccaaatgaaaccccagaggtccatggaagtcacatctgaccttctaagggacattctcttgtccaagcaccttttccctcagtggcccctgtccaggtgctgcttcagtctaggctccctcccactaggcactcttggcttttccataaatttctatcccagacgcagaacccagagctttttccacatattaaaaagtaatgattatactttaggtatttatgatccgttgaagcaagtgtaatttgaagagggtcctgggacccttgattcacaggcttcagagccaggggagactctcggagttgtctgtcttgacagcgaagaaggcaggaccttcagggcagggcttcagccccaggccaggggttccctgctctgcccgggggctgcccgttcaggcccattccttccccaacccggtacctccatgttgggtgggtgagggaatgagtggctgtaaagtatattcattgtatgaataaagtgggtcagggttcattgtgaacatttaaaggaaaccttttctggtatgaagtagtcctaggatgtacttaggtccattgtgttttgtcgttgttgttgttgttgttgtttttgagacggattttcgcttttgtcgccgagactggaatgcaatggcgcagtcttggctcactgcaacctccgcctcctggattcaagcaattctcctgcctcagcctcctgagtaactgaactacagtcacgcgccaccatgccagactaacttttatatttttagtagaggcggggtttcaccatgttggccagtctagtctcaaactcctgacctcaggtgatcaccagcctcggcctcccaaagtgctgggattacaggcgtgagccactgccttttttttttttttttttttgaaacggagtctcactcactggcccagactggagtgcagtgacaggatcatagttcacggcaacctcgaagtctcgggctcaagcgattctccttgcctcagcctcccaagtaactgggaccctgggaccaaagacatgccccaccacacccagctagttttttaattttttgtggagatgggatttcactgtgttccccaggctggtctgggacgcctgggctcaagcaattctcccacctcggctcccaaaacactttgggattataggcatgagccgctgcacctggcccaatgtctttttttttttttttaattgaaattttctttttgacacatgaccaaatttataccaagactaagtttccagcaatctattgcctatgctgatggctcccacgaccctccctcactcctttcttctgcctctttggggtgaatttcacccattcactgagaactgcccagcgccgggtcccttggaggagacagtcctgccgactttggggaaatggttgaaacctggttctgtctgtcctcagccaggtcgttttttttaaatttttattttattttattttattgtattttattttattttattttattttattttattttatttgagacggaatttcgttctgttgcccaggctagggtgcgatggcgccatctccactcactgcaacctctgcctcccatgttcaagtgattctcctgcctctgcctcctgagtagctgggattacaggcatgagccaccacttccggataattttgtatttttagtagagatgggatttctccgtgttggtcaggctggtctcaaattcccgatctcaggtgatccacccgcctccgcctcccaaatgctggaattgcaggtgtgagccaccgcgaaccaggtcatttattttgtcaccgccgtttcttcctctctcatcagcttacccaatgagtaccaggattcagtttttatttctacatttaatctcattttctcatgttacagccatttctgaccccagcaacggcattatgatgagataatttgcctttctctccattgtcaagttaaagggcgtgactcagatacacaccggctacaagagagcaaagctgtagacctcacattttttattatagagcaatttcttccaaatcagttaaggtttcaatgtttgccttcacaaaaaaatgaaacgcggttttgcaaattaatgttcgttatccgtatcttgggggaattgtttaataccgtgcagttaatgaaacaattcagcgatacttcttccaaaatcattgctaccttatcttcatctaatctaataatcaaaacatatcttctagtaacaagacttctgattttaattatcttaactccttgttgccagattgtcctgatacgaaacccacatgcagaaagcatctgacttcaccaaaccagggtttcctctcgccccaaaggaataaggttaattgaatgagatatgttctgagggctttttgtttttcctaatgtgtataatgtatagcctcaaatataacctaaaggaatacaattattaggaaaatatttttatgaataagacttggcaaattggcaacctgatgcttttgccatggggaaccctgcccccgcagtcttggctactcaaagaactcacctttacttaccacggagctgctttctttctttcttcttcctgtccccttcccctctttcatgtcttacgggggaccctcggacacacgatggggccttgaatcaggttgctgtttgggagaggaggctccaagctcccagctctgggctcagctgtttggagttgcaggtggttttcccatgaacacttggcagcaggtccttgatctttgagacatgtgccagggtgtttggtgacagtcacttggggagagggcatttcccataagcagaaggcttattgggcagaatcttttgtcctgagttcactgagttgtttccacccatactttccaatgatactttctgtagttggatatatcagaggactgactaattggttttctttctctaacccattgaaattctccatctttctgccactgagatttctcctcttccctcaaatttgatttgttatttcacaaggataccagacagctgcacatcttcgagtctgtcctgtccagggctctactttttcaagcaaagctccccataaatgccccgctatccacgtgtgtcatgggacatcgctaacctttaattaggcatggaaacagacgcaaaagtggaagatgtttcctcctgcctaatctgacaagtgcttaagcatagtgccacttgtaaagaagaactgtttttgcaattaatgaaatagcccgaccgccgtgacaaggctgctttttgataactctctattctgtggtcttctgttggaatgctttaatatagaagcagtataattagctagtcaactgcactgtacttgctacagcacagaagataatgctaccaatagcttcgatttaaaatagatatttataagaaaggctaactaaaagaacaccagtctcccagaaggagaaattatatttttctagagatgcgttaaagatcagtgcttcccactgggtggatggtcacatgcgttagaatcacctaggggtcttttccaaactgcttctctttccccactcctgaggttctgatgggtcccatggagacactatgggatgatgctgtgtccctcggggcactgaggtggtataaaagaggtggtataaaaccgtccctctggccttgggtgtctctcttttcatcttgcattctcggagcccaggagttcaagaccagctaattttttgtatttttagtagagacagggtttcaccatgttggccaggctggtcacgagctcctgacctcaggtcatctgcccgcctcagcctcccagagtgctgggattacaggcgtgagccatcgcgcccggccccatctcttaatttttttttttttaatgagccagagtggtggcacatgcccgttgtcccagctacctgggaggctggggagagaggatcattggagcatacacagcacccaccccattgctttggagatttggactcaccgtccagagtccacagtatccttgggctcctccccaactcccagcatcagcagaacctaaatctccatgcctgctgcctctgcctgaggaaccatggagacacatgtccttatctatggagagtccttgtccagtagaagaggaggtgcatgctgcccaggcctggaccccagagatgcagtgtcagctaagggtctgtgcctcagacccctgccctgggccagggggtccccgtgagaccgaagactcccacaccaactctaacctgagccagtcagacagcaccatgtggagcctggccccatttatctgcactgcagatgccactctgcccccacggtcagaattttatggaaaagagatattgtcaccttgaccactggctgtgcaacctggaagacatgacctttccctgggtctctgccttagtcagacctgccagaggcccctttgctgtttttttgagacagggtctcactctgttgcccaggctggagtgcagtggcaccatcatagctcactgtagcctcgacctccctggctcaaggaatcctcccacctcagcctcccaagtagtcgggactacaggcacacgccaccacacccggcgaatttttatatcttttgtagagatggggtcttgctatgttgcccaggctggtgtcgaactcctgggctcaagtgatcctcccacctcagtctcccctagtgctggggttacaggcgtgaaacaccatgccctgcagtagatagacatagtttatagattaaacacctaatttgctaaagccaaaatagttggcattgtaaagtttattatcatttaagtcttagccaggcttttaagagcttcaaatagacaattcttctggcatttcaggacccagctggggagcaccagctaggtttctggagccatgtgggctccgtgtatcttttccatcgtattattacaacaggcgtgtttgattggcacttgatcatcctacatctcaccactgtcctttgaaaacccatattcattctgaatctccccattcttcagatgagaaatgtgaggcccaaacaggctaaggttatccaaggtcacagtcagctagggtaggaccaggttggcagccaggtctctgacacttggccttttcttacctgtctgtgtaaagcccacgtgtgttccttagattcatgcattttattttattttatttttaaagacaggatcttgctcttttgccccaggatggagtacagtggcgtgatcataattcactgcagcctcaacctccagggctcaagtgatcctcccactttagcctcccaagtagctggaactacaggtgtgcaccaccacacccagttaatttttaaatttttgtagagacagggtctctctatgttgcccctgctggtcttgaactcctaggctcaagcaatcctcctgcctcggcctcccaaagtgctgggattcaaggcatgactcactgcacccagccagacaagtgcatttttcaggaagatgaccagttcccagattctctttccacagccttggacatgaagttacccttgacagcgggagccactccagggcacatgtgctctttctctgtggctctgctacagaatagcggggaccctgggaggtgacaggctgagatccgcagaccttcacgaacagagcccctggagaaacagaaccagagactctcttcagatccaatgtagccagattcaaccccacctagcagggatgtagtaattgtagtaacaaggacagtaacagtgctaaccaccatttacagagcactttgccatgtgcccacactgtactaagctctaagtacccaatatttttttaatcctcatcaaagcactgtaacatataaacatgatccccattttatagataaggaaactgaggcttggagaagtcaagtctgggtgggtaggttggttggttggttgattggttgatttatttatgtatttagagacagggtctcactcttttgcctggggtggagtggcaccatcacagctcactggagcctccacctcccagactcaagtgatcctcctgccccagcctcctgagtagctgggactgccggcacatgctaacacacccagctaatgttttggggttttttttttgttttttttttttggtagagacggggtcttgctatgttgtcgtgcttatcttgaactcctatgctcaagcgagctaccacacctgacccaagatgttgagtcttatctaggttcaccctgcaagtacgtggtggagccaggatctgtcggactctggagtccaggtttgcagagagcccccggctcatcctggcctctccggcatctcacttcctccctgcaggcacgtaggaccggcctcagctctgtcaagatctgcactgtaggaccccagagatttttttctttctttgggtagtcagacccatctgcaaaagttttgcaatcatgaaatcagatagcgtatgaaatgctaggaataagcgcaggtctagcataccacgcggccagcggtagcgtgacctgacaggaggagtgcgtcttcagagacattgggaaactggcgtgcctgtcgcccgtcccagggtcagagtcttcgaaaccaggctttctgggaacccaacaaggagtttctgatcgaagaaccgcactgaggacagttagtcttttttccacactgggcattttcagcattggaagtcaatgggagccctgcgtctgcaggttttgagatgtggcactcacagcagggtcactagaatggagacatccatgggaccaggttacaggcgctccggcagttgggagaagcgtcgccaagcagcctcccctaggctccatccagcttgtctgcccaagacagaaaacgtcatagaaggtttacagaagagatcttggggacttcctagttcaactgcccctaggtagatggcagaaccctcaatggaagctgtttagctctcagcaaaactcacggccaactaaaatacagtcgtgtgtcacttaacaatgaggctgtgttctgagaaatgcgtcaataggtgaatgcgttgttgtgcaatcatagtgtgtacttgcacaaacctagatagtatatatatatatatatatttttttttatttatgcctatttttcatacagaaaaccaaatgtcccagcaccattactgagcattagtcatttcccttgcttgatctgcagtgcctttataaagggccgtatgtcaactttctctgtatgttccattagaatcttacgggactcaggccaggcgtggtggcacacgcctataatcccacactttgggaggccgaggcgagtggatcacttagtgttaggagttcgagaccagcctggccaacattgtgaaacttcatctctactaaaaatagaaaaattagccagacattttgcaggcacctgtaatcctagctacttgggaagctgaggcaagagaattgcttgaacctgggaggcagaggttgcagtgagccaagatcgtgccactgcactccagcctgggcaacagagcgagactccatctcaaaaaaaaaagactcttatgggacttaggcagcctttgttgaccaaagcgttatgcggtgcatgattatacatggattccactcctaaaaccttccaattagggccaatcacaggccttcaaagaagacctgcagccgtgcccctagacagaaactgtaatgggacttagcagtgctaagagtcccaatatcaagccaggaacctggaatctcggcactttgagaggccaaagcaggaggatcacttgagcccaggagttcaagaccagcctgggcaacatagtgtgacctcgtcactacaaaataactttaaaaaaaaaaacaaagagtcccactgttgagggcccagagttgccaacatctgaactggttctttgctttgtgcaaacccttgagtaattgctgttattcccattttacagatgagaagtttattaacttgtccataggcacccaggtcagaagtgacagactcgagttccaggctcaggctgtcggccttcttggtctgtgccatgccaggctctgagaccctctgtgtgctcctccctctgtctgccttattcccagccggctcctattctctggatatgaccacgtttatgcacgctaaatttagaccacacctggctaattttttgtattttttttttttttttagtagagacggggtttcaccatgttagccaggatggtctcaatctcctgacctcatgatccacccaccttggcctcccaaagtgctgggattacaggcgtcagccaccgcgcccagccctgaatttttaaaacatcgggcaggttgggatttggatggtgccatctcctccccaaagtctagaatgttctcagttggctttaaactgtggtcttagccatggctagtcaagggcacctacaggcatggtggctcacgcctgtaattccaacactttgggaggctgaagtgggagaatcacttgagctcaggagtttgagaccagcctgggcaacatagcaagaccccctctcttaaaaaataaccgggtgtggtgatgtgcatctgtagttccagctactcaggaggctgaggcaggaggatcacttgagcccaggagttggaggctgtagtgagctatgatcgcaccactgcactccagcctgggtgacagagcaagatcctgtctcttttttaaaaaaaaaaagaagaagaagaacaagaagcataatacctagaaaccctgtagaggggaagttaccggaaatgacaattgttcacctctagcttggaaacatgctgaatggccagaacaccctcccggcaccgcccctccatattcttgttttatgtagagttgcctcatttcctccaaggagctccctttagaaaagatcaaaagcaaactagtccaaaaacaccttcagagaagaaagcaccccctacgaccaccctacagcaatggctcctctcacaagaaagccctgcagagctgtgggcagaaacggccacatcaggctgggtggggtggctcacacctgtaatcccagcactttgggaagctgaggcgagagggtcacctggggtcgggagttcgagaccagcctggccaacatgacaaaaccccgtctctactaaaaacacaaaaaaaagtagccaggagtggtgatgcatgcctgtaatctcagctactggggaggctaaggcaggaaaattgcttgaacttgggaggcggaggttgcagtgagcgaagccaagatcacgctactgcactccagcctaggcaacagagcgagagtctgtctccaccaaaaaaaaaaaaaaaaaaggattaaaaaggaaaaaaaggaaacaggccacatcaatccccagtgagctcacagacctttctggagcccactggagcgtcatcatactttggaaatgtgccatccctcccctaggcccctgagagggagcagcatctcggtcagggccctccccgcaggactcagaccagctggctgtcagggaagccaccaagcactcgactgaacaggtccctgctcctaaaaccccagcatccaggggttcaggagtggaaaggcctttgccctgatgcctatctgatgcctactctcaatacaaaagggctgtgtctctcgttagtagaggtcctcccaaaggtgttgacaaccagctgtatgagtccctcagcctaatatattttgtttaaaaccacacgctgcttttcagacaccaggaaagcctctcctcctgtcctcctgtttgctgtttcatggcacttcctacaaagtacacttttcctcctctgcttttcacctctgcaaagattcttccttcttttttttgggtgcggggggggatgcttttttttttttttttttaaaaaaaaaagaggtagggtctccactcctcactctgtcacccaggctggagtgcagcagcacaatcatagctcactgcaccctccaactcccgggctcaggcagtcctcccacctcagcctcccaaagtgctggaattacaggcgtgagccaccacacccttcattctgcttttgctaagttgtacgttacaaccttacagcatccctacacactttgccgtgcctgggcacgcactcacactgggcaggccaggagcgtgagggacaaaagatggccccagcaccgttgactccattcgcaagggctggcttcccctctcaggcacagctggctgttccgcagtgaatgccgtcggtgaagtccgtcgacctgttgtcaggcatggccactgatcaaattcttctctgttttcagcaactggaagaaaaactcaaaggccaggctgactatgaagaggtgaagaaagagctgaagtaagtacggagagccctgtggcccctcacacgctggggcgcattagggccatctgctaacaatgccaggctggtggcaggaagccttggccccctgccctctggctcagcagatgcccgtaaatgcagccagagttctaccactgcatggtgtcctgggctacccaccactgtgggcgtttgcccttgggcctgtccctgaattctttggacttttgctaaaagctgtgcattgcaggtattccagaatgtatggaatcaggggcatagggcttttacagaaatgatcaaatatgaccttgttttgcaactataaattccccaaacagaaacaaagcacaggagggaaatgttttcgggttgaaggtgggcatatggcctcacgctgccccggcctcctggactcaggaactctgtcttccaaactctattctccatctgtgaggctgtagccgaaagcttatcatcttttcagggctaatgatggcattctcagttctcaagcttcaaagttcctttctcggccagcagcccccacctctgcctcctcaccctgagcctgctttggcactctggagctcccaggtcctggtctttacctgtccccccacatccataatgctccaggctcactgacctcccctgcaagcctggagcctgtggtcagaccctctacgttcatacagctcccctggatcgtcagccattccaagccttcccactggcatgcccgcctcactcctaggttattaagcactgcaaacgaaggttgcctagggcatggtgaccagccccacaggtcccccgtgcttctcgcggctggagctctgctggttcgaggcttcctcaggggttcctccctgcccttgtcactgttaccccaaccactatccacagatgccctagccctctgctagggacagactcccgcctctggtcttgggtgccacctcccatctctgcaggctgccccctctgcctagaccttgagtcccttccttcctgcccctcctgctgtcccatcagcccctttctctcttgctgctattttccatttctccttttaagatgagcctacacccactcaccacgttttctttgtgttgttaattccattctgctaagaaaagctcctcgggcatcctcttgaaccatctcacttccatgaccagctgccttctctcgcctgggacccccagcctccctggcgtctgctggccctggtagtccctgtccccaccatgctctccccctgagcggtctcatcccctctccagctgcaaagcctctgccggcacctcctcggacagacccctacatccctctaacagttccagcctctgtaacttacttacttgcttgcttacttatttatttatttgacagagtttagctcttgttgcccaggctggagtgcaatggtgctatctcggctcaccgcaacctccgcctcccgagttcaagcgattctcctgcctcagcctcacaagtagctgggattacgggcatgagccaccaccccgggctaattttgtatttttggtagagatggggtttctccatgttggtcaggctggtctcaatctcccgacctcaggtgatccacccacctcagcctcccaaagtgccgggattacatgtaacttattattaaacattacctggttaaccttctctacctgcctctcctatcccattctttccttcctttccctcttcttccctcttccaaaaagaaaaagaaattgggccttttaattttgagccagagaaactgctgcgaaggcctttgcccagcctcaccctgggagttagtcgtcgtcttcattgtcgtcttcgttgtcttcttctttcttcctctcttcttctttcttcctcctcctcttcttctttcttcctcttcctcttcttcttcctcttgctcctcctcctcctcctcttctcccccaacccccacgttcacttcatcccctgggagctgaggcttccaggctccagcctgcaacacataccgttctactccctctcatccacagcctgccggaccacaggctgcccctacccccactgaagggctgccacaccagccccgcttgtcactgcatttctgctaactctttctgttgcgtccgcacatgacaggccccaccaccatgtgcacatctggaagccccactcaggtggcttctttgcccaaatgcgctcctagttttccacttcctggtgaaccagctgtgctcttgagctcttgcccgcgtccccttctcagcatcgtcccatttccacttcctcacccccacgcaacaggggatgctgacctcagatcctcatgcactgcagcacaagacaccctgtcccttcagggcccttctccaatgcttgttcatcatgacactgagacgtggtctccaatccatcaagatccctcctgctggggtcctcacaagttctgtcttaatggaccacttggagtcttgcctattacctgtaatggcctgtaaatttcctggagtacggaccaggagtggttctgattccccacggcaacaagcggatagcaggctgctggtaaagatctgtagaatagataaagagccacgtggtcttttattacataatcctaaagaaaataggaaacgaaggacaggattccatcttaagaaacccctttcagctgggcgcagtggctcacatctgtaatcccagcactttgggaggccgacagatcacctgaggtcaggaaaccagcttggccaaaaccgtctctactaaaaataaattatccaggtgtggtggctcacactagggggacagaggccgaaattgtggctgcaggaacatggcgaaggtccggttgactctgcacctgcgagtcgtaaatctcacggtccagccagcctgctctgggtctctctcttccatccttggtatttcaaagaaacacttgcagctccttcaaagccacatagcctcacttcccctcttctccctggtaaactcagcaaaaaagggacatccacagcaaaaggaactcaagaaacagtaataatcctggggacctggactcactgagacagcccagagaccgtagtgatcagggtgcggcccttttcagtgccattgagaacaagggagggagaagtcaccttctcttgccacatctttgtcattgcactccttccccaacctggggctgcagagaaggtctgcccacctggcttctgagtcatccaagtctaggaggttgctctttgcctatgtcccctggtccccaggtaggtgccagttaggagtgaggtgtgggcagtggccgccctggtgggttcccctctctctggcttctccttacaactttttccttccctttaagctttacaaatacattccacttgcaacaatgttatgtctgtattaaactttaaaattatactctgaacagacctggtgtgattccatatggaatgatttacatgctaggcaagaaacttttgccagccaactgctagttgaatagttattctagagacattatcagattctattactgccagggaagttgttaaagttgacagttcttcggttcctggagagcaggaaattgtaatgttaatgcttattaatgtggctgttgtcaaaggtataagtagaaaataatcactctggtggctcatgcctgtaataccaacactttgggaggctgaggcgggtggatcacttgaggtcaggagttcgagactagcctggccaacgtggtgaaaccccgtctctactagaaatacaaaaattagctgggcatgatggcacatgcctgtaatcccagctactcgggaggctgaggtaggagaatcgcttgaacctgggcagaggttgcagtgagccaatatcgcgccactgcactctagcctgggtgacagaacgagactctgtctcaaaaaataaataaaataacccctctgttgtgctcttgcagcattctgaagtccatggagtttgcaccgtccgagggcgctgggacacaggtacgtgtctcacctcaatggtcagcactagcatcagccccgctgctggttaccactggtccctccggcatatcccatgatccactgtttctacgagacctctcacttacagccgatgagtcatacttcaagaacatttaaccaagttgaagcaaattatctttttttttttgtctcctttttttccatgtgtccaaggcatgaaccaggcatagatcaaaagccaagctggggatgaacaagggattgcttcatccctgactgataggagatgggcactaccaaaaagcaaattatctttaacaaaaagaggcaaaaagagaaaagctagtgttttccaaactggtaactgaagtgaaattgtgatttcacttcagcaggtactaagaacataaataaaaaacaatttcagattgtgtttaagaaggccaggctcagtagctcatgcctgtaatcccagcactttgggaggccaagacaggaggatcgctttgaggccaggaatttgagaccagcctgggcaatatagcaagaccatgttgctattaaaaaaaaaaaaaatagccaagtactgtgacatatacccgtggtcccagctacttgggaggctgaggcaggaagatcgcttgagcccagtagttcaaggctatagtgagctatgatcgcaccactgcactccagcctggacaacagattgagactgactattttttttttaattgcattaaagagcagccaaaaatggattggtttaggaactttagttacatgctgcctcagtagagaaggtacaagggaaggatgactgtggcccagggtcatctggtggccaattaaaattgacatcccagaccaagcatggtggctcactcctgtaatcccagcactttgggaggctgaggtaggtggatcacttgaggtcaggcatttgagaccagcctggccaatatggtgaaaccctatctctgccaaaaatataaaaaattagctgagcgtggtggcgcacgtctgtaatcccagctacttgggaggctgaggaaggagaatcacttgaacccaggagccagagggtacagtgagccaagatcatgccactgcactccagcctgggcgacagagtgagactccatctcaaaaaattaaaaaatcaaatcaaataaaattgacatcctaagtggaatctgactcctgatgcccagaagacagccaacatctttgtggctggcaaaaaaaaaaaaaaaagaaaagttccctttacagtaacgttcggacagacgtttgtggcttggcagccagtcttatggccaaatgaggcacgggctcaggtcgcttgagtttgagaacagatgagagaataattaatttttttaggagctgtggaagtctaagaaggaaaatgacttcaactagaatccattctttctaaagggaacttgttttccacgtgtgttaaacgacttggggggaaatcagctgtccgcagcccacttcctaatcagatcgagagctgggtgggaacgcggacagatggagggaggcagggctccaggcctggtggccccgggagcgggtgagtggccggccccgcagtgagacccccgctctgccccttctaggatgcggccaagcccctggaggtgctgttgctggagaagaaccgctcgctgcagtccgagaacgccgcgctgcgcatctccaacagcgacctgagcggtaggttggccgggcttcgcgcgtgtgcggtggttggttcgcttccaggggtcggtcgaggacgaggaaggtgaatcgtgagtctggacagatgcatggccagagaagcgccggttgacgagaacctttgactaacgcgtgttgggtgccctcctcctcaccgctcctcccttcccttccccgccctgcttaaagctggatgtcgagacgggccagccgcacaggctctgcggaggtcagttaggggcagtgcggctggaatccccgggagggacagctcggaggacgtcggcctttctgatctgtgtctggttgtgctgcacagaggccaggggcagtgtgaacccagcctcgctctggtggtgttttcagggacagccccgggcctgccgggtccagtagaggtttttcttccttggtcaggtttcccctggggacgcgtcccccatccttagcctttcttggctcatcccccaaatggtggcgtcacttgactgtgcttctggtttgggcagctggtaaaacgcgtacaggtgtctcgggctctaatggtattgcattctcaaaacgggcgcgcgcctccacatcgagggggctcggtacggtgcatcgcctcagagcaagaggtgcgagcgaatccattggtcctaaaatgtcagtgtttgctgctcctccggccggggccagcgggcccagtaagaggcccgcgacccgtcaactcttccctgtgtgtgtcaccagctccttgtcacgctaggagtttgagtctatgtcaaggggactctccaggctgcaacgtacaagaaaggcgcaaacatgaatgcatgttgcttgttttgggaagcctcgtttggctgacttacaaatttaatcggaaaacaaaccaacccacctcattggcccttgtaaaaaaaacctgcacttttttttgttttcccttttgcgggggcaaacttttgcattttggtcttggtttttttttccccctttggaatcccccataatgcattctgtttgcccttccttgtagggtcagccaggaggaaagggaaagaccagcctgaaagtcggcgcccgggatctttgccggccccccctccttctcagttgccccgcaacccgggggagcaggcttccaatactaatggtacacaccagttctcaccagcggggttaagtcaagactttttcagctcatccctggcaagccccagcctacccctggcttctacaggaaaatttgcactaaactctcttctccagcggcagctaatgcagtccttctactccaaggctatgcaggaagccggaagcacaagcatgattttttcaacaggtccatacagcacaaactccatatcttcccaaagtccattacaacaaagcccagatgtcaatggcatggccccatcccccagccagtcagaaagtgctgggagcgtctccgagggcgaggagatggacactgcagaaatcgcccggcaggtcaaagagcagctgattaagcacaatatcggacaacgtattttcggacattatgtgttgggactgtctcaagggtccgtgagcgagattctggcccggcccaagccatggaataaactgactgttcgtggcaaggagccatttcacaagatgaaacagttcctctccgatgagcagaacatcctggccctccgtagcatccaaggcagacaaagaggtgagagactggcgttgggtggcgccagcgtgcgagcccgtcacagagttgcacatgtgtgtgtgcatgcgtgcgtgtgtctgtgtgcgtgatgaaacatttgtgcatcacatcaggtaaagttctctttgcttctgccacgtccagagctcaagggtggcccggcatgagttaaggctgttagatttgggagatctggcctttgaaacgcactcagcactccatacttaggaaaccctatagtatttcaatactagagatcgtatcagagggaattgcattacatgatgtatagcgtctccgtatgcttagtggccgcgggtccaattggccttgggtgctggtctcacttttgggaggagcccttaagtcccctccagccccatagcagcaacgttgactgggctcgatcctcatgcaaagctggttctgtagggagaacacatcacagatgacacctcccctcttcccaccccgcagaagagggcgtgtcccatggccaccttccctacattgttcacggtccattagtgatttgtttagcattatgagtaaaacaggcctggcttgagtaaaatacacaaaagttttatttaagcaccctttctaccccaccctccgtaaaaagataaaatgtcagtcacattcataatttcaaaaaatcccagccgggcacagtagctcacgcctataattccagcagtttgggaggctgaggtggatggatcgcttgagtccaggagttcaagaccagcctgggcaacatatattttgtaatcttttgatctacaaaaaaatcaaaaggttagctgggcgtggtggcgtgtacctgtggtcccagctacttgagaggctaaggcaggaggatggcttgagcccaggaggtggaggctgcagtgagccatgattgagccactgcactccagtctgggcaacagagtgagaacctgcctcaaataaaaaaacaaaaaagaaagttccttttctgtttaagaccaggggatcaatgtgccacatcaacagagctattgagaggtcatttcatcagacatgtttgaaacaccctgaaatttagactcaaacagagcagggagatgttttgaacagcatcaatttgcaccaagaaaatgcagtgttttatgaggatgttaaccgaaattgaatgtctttggatgattaatgcgagctttgttctgggggctggcgggtgatcctccttcaaggcagtcctccctcccatggacctccctggcctcaatgccgtaggtcgctacttagatttcccccatctccttttgcagcagagccacggcctctgcgggccggtcagccagggaagggcctctcagaagattctagaaactcccgagttgcacaggcagccctgagccctttctttagtgacaggcggctcagatttcatgtcacacagcccatatcgtcaacaccaccattcccctgattgttttgttcttaccacacttgtttttcaacagagaatccaggccagagcctgaacagactatttcaggaagtaccgaaacgaagaaatgggtctgaaggtatgttgcaggcaggcgttttctttgcagtcagtcacctagggaagcagcatgtccttagctgtgtatttgggttaaaactgtgcagtgtgattctggcctggaacctgatggaaaaacagctagtaagtataaaacaaggcacgggttcaagcacacccagccccttcctcccgagctgcctgccctctcccaagcacaggcgggggtgagaagaggcattgctaagctaagccccccgagtctgaatcccagcccacttcagatcctaattacccggtcccccgtttttctcagacgcagttgaaaaaataacagcggttgctctgagaaaagtcaggtgacccgtcaaattaaatactgctgcttcctcgtatttttaactcggaaacacactcaaggtcctatggaacggacgcatcccacatcgtcccggtggcatacttgtttttaaatggtggtatacttgttttgaatgcagtggttcctatttaggaaggtagtaagaaattaaactatccgggtggcttcccgaaagagctggggccagcccctgggccatagtagcctcatttcgtcggcacgtgtgcctgcacaaaacatcaccatgtggccgaaagaatccatcctccccacttaggaatttctgcaggctcctttcctcgtatgtaaattttaaaaagatattatgtgataataggtgcaaacaattttttaagttaagcctttcttcaccctgtgcctctgaatgattgatagacaatcagcctcaaaccctctgccctccttttccgtttatcctgtgtgggaccccagcatccaataaacatctaaccccgaggagagtcagtcccaagccacagcagttgcttctaagtgactcatgagaaacattgccttttaatcactcgccttttatatatatggattaaatgatcggttctcccgggtactaacccacgggtggtgtccggctttggcagagtaacattgaccgtaaggtcaaatgagcaggaaatccctcctgcccggtgtcgctgtgaagttgcactcacagcaaacacaggccactgggaggccacatctgcctccttgtgtcaccagcccccacccggggctatatatcagaatgacgtcttcgcgcagcgctgatttttgtccggggtttgggtttgatgtcattggcgcaacttctccccacaggtaacatcaccacccggatccgagcctcggagactggctctgatgaagccatcaagtccatcctagagcaagccaagagggagctccaagtgcagaaaactggtacagcttccatttcttcatccactgtcttcaaacttaattaagagaattgtcatgagtgctctggtcagcagtaattaactattttttttttaaacaataatgaatgcctgttctcaagcatttaggcacgtagagagaagcaggtctgtgtgatctgtatttgcctaatagttacctttttttttgagatgcagtctctctctgttgcctgtgctggagtgcagtggcacgatctcagctcactgcaacctctgcctcccgggtttaagcgattctcctgcctcagtctcccgagtagctgggactatagacatgtgccaccatgcccatgatatttgtgtttttagtagagacggggttttaccatgtcggccaggctggtctcgaactcctgacctccagtgatcctcccacctcggcctcccacggtgctgggattacaggtgtgagccaccgcgcctggcccctagttgtaattattcacagaaattacgctccttaactttgacagaaccacttgcatttcagaatatagcacaggaaaatgaataccaagtataaaaattatcagaggtcaggcgcggtggctcacacctgcaatcctggcattttgggaagctgatgggggaggatgacttgagttcaggagtttaagaccagcctatgcaacacagtgagagaccttgtctcttaaaacactagccaggcatggtggcatgcacctgtggtcccagctacttgggaggctgagctgggaggattgcttgagccagggaggtggagggtgggtacagtgagccgtgatcgtgccactgcgctccagcctggacaacagcgagatcctgtcgctaaaaaaaaaaaaaaaaaaaaaaaaaaaaattctcggggaaaggagccccaggagggcaggtcggggagcactttcactgacaccccctttattaccctctacatctgtgtgtataccaaaggccaccaggtcatcaagctgtagtgtcaggccctggtccttggttgagacaagatgcctgaatgtttcactgacaggggccatgctggggaaatacacagtgtggttctcccaaataacccacactttgcagtaggtcaagttaggatgagaagcatgtccccagctgaagggggccgccctgccacactctcacccctgtttctccatgcagcagagccggcccagccttcctccgcatccggcagcgggaactctgatgacgccatccgctccatcctgcagcaagcccgccgggagatggaggcccagcaggctgccctcgaccctgccttaaagcaggcaccactgtcccagagtgacatcaccatcctcacccccaagcttctgtccacctcgcccatgcccaccgtgtccagctacccacctctcgccatctccctgaagaagccctccgcagctcctgaggccggtgcctctgctctgccgaaccccccggccctcaaaaaggaggcccaggacgcccccgggctggacccccagggagcagccgattgtgcacaaggggtcctgagacaggtgaaaaatgaggtgggccgcagcggtgcctggaaggaccactggtggagcgcggtgcagccggagagaagaaatgccgcctcctccgaggaggccaaggccgaagaaacgggcggcgggaaagagaagggcagcggtggcagcggaggtggcagccagcctcgggccgagcgcagtcagctccagggaccctcgtcgtcagagtactggaaggagtggcccagcgctgagtccccatactcccagagctcagagctgagtctgaccggggccagccgcagcgagacaccacagaacagccccctgccatcctccccgatcgtgcccatgtccaagcccaccaagccctcggtccccccgctgacccccgagcagtacgaggtctacatgtaccaggaggtggacaccatcgagctcacccggcaggttaaggaaaagctggccaagaacggcatctgccagagaatcttcggggagaaggtaagggatctgctctgggggctttggttctcccatctcttctccttgctgaggaccaagtatctatcccgcagcctgtgaccctcacccatttcaattcacccaagagcagagcgtaaggcatcctctgctcccagacttccaaggtgcggctggtgaacattgcagccccgatcccatttgccgagccccgactgcagccaggttctaggctcagcctttcacctgcatgctgccctttcgacccctcacttggcgctgggaagtggatggtaaaatccccaattgacagggaaggacaccaaggcttggggacgttaactacttgccccaagctgaccggcagccgagtccacatccagcttttgctgccaaggggagctgagaggcacccctgcaggcttccttggccaaaaaaaatcccatctgatcacacagagggaccaccagtacgcagagagccaaaagggacttactagaaaaagctgcagagagcattattgttcctttctgtgtaactcttggatattgttcagtcagagaggtcaagcaacctgcccggggacacacagcttggggatggcccaagcagggtggcccgtgtttccctatcatccttccctggctcaggaaagtgtaatcgtgcatggacgagcttctaggcctttctgttcttggcactttcctggtcactgagattcaggagaatgagggttaaccgtgcctgccaaatctaaaataaacatcatgtcctagtatcattttatttatttattttttgagatggcgtctcactctgtcgcccatgctagagtgcagtgacgctatctcggctcactgcaacctctgcctcctgggttcaagcgattctcctgcttcagcctcctgagtagctgggattacgagtgcccaccaccacacccagctaatttttctatttttagtcgagtcagggtttcaccatgttggccaggctggtctcctgacctcaagtgatctgcctgccttggcctcccaaccccctaccattttagattaaataacggagtgctgaatagaaggagaagcacccctctcccctaaaaggcaccttcctgagggagcacgtggctggatcagcaggggacaaatcccaccccctcccctgccaagccagggtccctgcatggcgccgtccccgcactccccaccccgccttccactcagtgtttgccgtatgctgtgctgtgaatcccggtggtgtccgatggcgaactttgccctgattttgcaaaaggtgaaggggggcgactagaaatgaggatgagtatttcaagtcccttgagatttctagttcagtgttgtaaaaataccatttgagaacattgaaatagacattcgtgctcatgccttaaatttagcagagacttaataacattgaacttgtttggcccgtgagtgcagttttattctggaacttgagaacttttcaaaagagtgatcggatgcagcccctaaatatcccagggcggcatctgtgtcctgtggggggtgtttgtgcctatacatatgtatggccatatgggagcgtcagaaaactcgggtgtgtacacgcaactcggcaatcatctgcggcggaatgtcactcccaggccggctccccaggtcccaccagctcacctctgggcccccacctttgatcaggatgtggtcagaacaagcagacctttctaaatgctggcctggctcagcgtttgcagaggacaccagcttcgccagtcccaccggcacccactgccccacctctggagggatcttgtccctggaaccttagcctttcccggtgccaccaagtgaagagcaaggtgcttgtacacacctcctccgcggggtgtcagggtgacagccctgccatcttggcaggatcaagaccctgggatgagaccctcttccctccctgggagctgagagctgtggctgtaaccatggctcacccgaaagtccccctgtgccggggtctcagccaccgttgatctttaaatgcatattccctgcccacaagctgtcaccgccaccaggccgtggttctgtgctcagaagtcagccctagacgcgccctctgcgtggtgggtgtgcattgcagcagcatctgtggtgtcatgctaatagccaggcactgatggcctgtgtgttcggtgccactccaggtgctgggcctgtcccagggcagcgtcagcgacatgctgtcccgaccgaagccatggagcaagctgacgcagaaaggccgagaacccttcatccggatgcagctctggctgaacggcgagctaggccagggtgttctacccgtccagggccagcagcaagggccaggtaatgggggtcctgccacaggagaggggctgcccccccatagcaaggacctggtcacagcagccccacctgggctatgcagagagggaggagggaactccgccccaggaggtggccaaccacactccccaccgtgggctggtgctgggggacagaaccgtccccttcctccacaacctgttgccgtgggactgacttcagtgtttaggagagatcatgcctgtctaattttataagcagcagaaaatgagttaccaatttaaaaaatgctgtttatacataaatacaggtaaaagtcaagtagctgaatcagggagtcaggaaagaaagtcagccaaaggtacaaaagtggaagatgtcacaggcgaaacctttcacctgctcccggcccgggggcctggccttgcaacagcagcgcctccccggcccgtgggtccccatgcccgcccctccccaggaggaatgggaagcctccccgggccttgccacattcagttaggaagctttaagccctgggccgcgttccttcctttaattataacctttttctactttagtcctccactccgtgacatcgctccaggacccgctgcagcagggctgtgtgagctcaggtaagcagccagtttctgttgcttttgcatgaaatgtctcactgccttttctgttgtcccgtgctgtggtctgtcccggcgagactccgagggaccgcacattctggatttggggagctgaaatatggcatcctatctgcaaacggggtccctctctgtgtcagtttctaatggagagcgagctgacagtgcatggagggactctgccaagatttgcacgcccactgtcatcctttgtcggcccagagccttgtgttcagggctggggtctaagtcggagacagattccccactcagggggcttaccgtctgataggaagggataaagcacgggcacacgtccctctcctggtggggtcatgtcgggggacttcttatctaaccggaagacatccaggcagcctctgagcaagaaaatggggagctttgagcttgagcagtgggaaaggtagggtagcagaaaggaaatggccaggaagcccctgaagacagctcaggtgtgaacgaatggagagctggggactgagatctgagcctgggagcaggtggtggcggagagtggtggctgcaggctgagaaactcgggctccttcctgtctgcatttcacagcctcgaggtctccaaccacacttgttctctttgccacatggtgcctggacacagcccaccgaggctgacccatggccacggctcccaggctctcgtctgcgcccccccgcctcccttctcgtgcgccaatcccacacttggagctgagcttttcacagccagcttttaggaacagccagcactgtgagctggtcctctttttccctttctgtatttttctaaacatgttgattcgtctccatatcccattgattcattgaaaacacaaacaaagctaacaggagcacgaagcccgccagcttgccgcaagctccacgagggggaacatgtgtagcacggggaacagctgtgtggcagtggctgctgcttctacaagagaccaaaccctcatacagatgcagccggggcacctcggtggcatccaagtccccagttgagagttctgcgtgttttccgtgttctgatttgactctgaccaacgtgggggtcgagaggctgcatctcacccgcgccgtgggtcttcttggctggacatctaggtggagcgggtgcccattggaagaagggatcactcattctggcttggccaatttaattagaaagtaccaagaactaatccagcactggctcgagttcagaatacttcaggggaaataatggacatagctgtttgtgctggagttttacggacgtctgcttggaaagttagccttgaccccctgctctaacgggaagttggccttcttgaaactcacgagagtatttgattccattgaggcaggactgaacttggcagaaagtgactaatgtattctagatcaaaaccccttgttagaccaggtgcggtggctcacgcctgtaatcccaacactttgggaggccgaggtgggtgcatcacctgaggtcaggagtttaagaccagcctggccaacgtggtgaaaccccgtctctactaaagatacaaaaaaattagctgagtgtggtggtaggagcctgtaatcccagctagtcaggaggctgaggcaggagaattgcttgaacccaggaggcggaggttgcagtgagctgagatcgtaccactgcactctagcctgggcaacagagcgagactccatctcaaaaacaaaaaaaaccctcgtcctacataaaacaggaagtctcccctggtgccaggcctgctaatgatcgatgccagaagcaacttctatgtgacggaacaaatccttgaagaatgacgttttactttgtattgtaacggatcatcgccactgtgctggaacgtttgtacaacagtcacatttcaaacctaggaaaaacacactaggctcctaagaggaatgtaaatgatatttgtaaaatatcaattgactttatagaataaagttagttaagactcctgggcaatctcgcagattggaagcaggagagagaaaaaggcgatgagcccctggatgaaacggaacagagtgtagaagttgccagtggtttttgtgaagaggcagcagatgggtgtgtctcccccacccgccttccatgtcattccagcaagaggggaggttgagcacaaatcacttacccaaaatcttgaagtcataggaaagccaccagcagaagcaaaaatcgtggtgactagggagaaaaatggaaaaagatttcttatttgcaggaaaaaatatttttttttttttgagacagagtctcgctgtgtcacccaggctggagtgcagtggcacaatctcagctcactgtaacctccacccccccaggttcaagtgattctcctgcctcagcctcctgagtagctgggaatacaggtacccatcaccacgcccggctaatttttgtagtttcggtagtgacagagtttcaacatgttggccaggccggtctcgaactcctgatctcaggtgatccccccaccttggcctcccaaagtgctgggattacaggtgtgagccactgcacctggccaggaaaattttaaaaaattgtatagcataatgatggccaagtgaaaatatttctctggaccaggaagactaggagggctttgccagaaagaaaagagattatcatatggttttcctcgtctgaatctttactatcagaggttacttttcaagggagtttcacacagaggctcacatctgtaatccaagcactttgggaagccaaggcagacagatcacctgaacttaggagttcgagaccagcctgggcaacatggtgaaaccccatctctacaaaaaatgcaaaaattagccaggtgtgatggcatgcacctgtagttccagctacttgggggactgaggcgggaggattgcttgagcccaggaggtcgaggctgcagtaagccaagatcacgccactgcactccaagctgggtgacagacggagaccctgtctcaaaaaaaaacaaaagagaaaagaaaaaaagctatgttcacagtatatggagtgtgtgtgtgtgtgtgtgtctgtgtgatggagtctcactctgtcgcctaggctggagtgcagtggcacaatctcagctcactgcaacctccgcctcctgggttcaggcgattctcctgcctcagcctcccaagtagctgaaactacaggcatgcgccagcacacccagctagttgtatttttagtagagacggggtttcgccctgttggccaggttggtcttgaactcccaacctcaggtgatccacccgccttagcttcctaaagtgctgggattataggcatgagccaccgtgccccacctagtatatggaatttaatttagaaaaatagagttgctaacagtggtttttagtaaatccttgggattagtgacatgagagactagaatcttccttgactgtgtctctgtggaagcttccagcagtgctgcccctgaagcaggagagcgagcctctgtcctaagattgctacaggattccgattccctgttcttcccatggctaccccagaatcctttcaagaggcccccagacccagaagatgctccctccattgcttgcctcaagtagctcgccgtggtagaaccaatgtctgcagaaaggtcattgcaagcccggcttggcttcttcctgaatgtcagtgagaaatgctcagtgcttgagattctgggcctcgaagatggactggcggttggttttccttcccaggtaggcagggactttggacaacttgctcagccagccacagccctgcagtaagggaatcgggcttacagcggagtccgtgggggcggatggctctgtgctctgtgctcggttaccatggtgatcaggtgccctgcgctagagtggcctcgcccatctgaacagcaagctgctggcccaggagtctattttcttttcctcactgagagctcccgtcagccttttcctgccgggctctgttgccttgtctgtccttccgttttccttaatgacttagacgccaatttgccaaaaaggagagagaaactgacatttcattcacatcatcactttttcctcttggtggatacaactggttctgaatgttcctctaagaatccgagcatgggggtgacgggcttgggcattaaggaaatttgatgccatttttaagcagcagcgtcactagtgacccaccactttttcttagacactgttgaggccttgaaaaggcgtaaggtgagcggtaggttccatgccagtcatgagtaactttttttttaagaaaaaggatttttaagagacaaatcttcagatcagttacctgttcatagatttcctggtacgtcttaactttctacaaatatttttttttgtttgcttcttgcaaaatgcccagcaccttgggatataaaggggggtgtagttataaccagggtcatctttgatctcatttggaaaacttcatttcaagatggagttgcaggtggtccttggggactgattctgcaagccccttttgtctgtcagtcattccaggcttcatccctcatttctggacctcacactacttaaccataccaaatgttcatagaggagaaggtagaggctcattaaggcttgtttgctcagagtgtggccttcttatcatttagcaatttattgtatcttattctatttattttatttattttttatagacagacggggactcactctgttgcccaggctggagtgcagtgacacaatcacagctcaatacagcctcaatctctcaggctcaaacaatcctctctcctcagcctcctgagtagctgggacttatagacactttccaccacactcagctaatttttttattttttgtagaagtgggtctctcttttttattcgtttttgtttttgttttttgagatggagtctcgttctgtcacctgggctggagtgcagtggcgcgatctcgactcactgcaacctacacctccggggttcaagtaattctccttcctcagcctcccaagtagctgggattacaggtgcctgccaccacacccaggtaatttttgtatttttaatagagatggggtttcaccatgttggccaggctagtctccaactcctgacctcgggtgatcctcccaccttggcctcccaaagtgctaggattacaggtgtaagtcaccacacccggccttttttattctttatttccaaatacccaagtaacctggtctctgttgccagggctggtctcaaactcctggcctcccaaagtgctgggattaccgatgtgagccaccatacccggccactttgtaactttttaatgtgggagcgtttcattgctgtggctaacaagctgttacgtctgcattcacactggcttcaggtgtattatggctatccaggtggaaggatggtcccctgcccttggctgaatcgtgaaatacccagctctttcctggcgtgttaggaatgatgggttccaagccttctctgctgcctgttgctgttcccagtcagccaacagagtatcagttgcctctttgagaagacagctgctatggtctgtctctaatgtgggtggtccaatgtgtgcccctctttgacgtgaagcccacggggccgtgggctgtccatgaccttgtacaaccaggagattccccttggctgcagcccctatcgcggacaggtccacgttccttttgaatgtgcatgcgtatcatggtcatggctcttagctggttcccaccagacagccaggaacacgtgtccagggctcgtgagctttgaactctgcagtaagattctaaagcagtgtccttgataagcagtcagtcggctctcccacattcatggctaacagtcagtgtcgggggcatgtggatagcatgttcatagggacaggagaggctgattgcacccctgggcattccacagcactgtctaaagcaggcaggggccaggcgcggtggctcacacctgtaatcccagccctttgggaggccgaggtgggtggatcacttgaggtcagaagtttgagaccagcctggccaacatggtgaaactcggtctctactaaaaatataaaaataagtcaggcatggtggcttgcacctgtgatccctgctactcaggaggctgaggcaagagtatcacttgaacccaggaggtggaggctgcagtgagcaatgatagcatcactgcactgcagcctgggtgacaaagcgagaccctctccgcccgcaaaaaaagaatacctcttcaattggagacattaaagaatcagcttttcggctgggcgcagtggctcacacctgtaatcccagcactttgagaggccgaggcaggtgcatcacctgacgtcaggagttcgagaccagcctggccaacatggggaaaccccgtctctagtaaaaatacaaaaattagccaggcgtggtggtgcacacctgtaatccagctccttgggaggctgaggcaggagaattgcttgaacccgagagacccaggttgcagtgggccgagattgcactattgcactccagcagggtgacaagagtgaaactccatctaaaaaaaaaaaaaaaaaaaaaaaaactcaacctgatctcggctgagctaagatgcaaagggactggctgtgccactgtgaacccttccagaggcaggtgaggcaggccgcgcgggagcagcacgggaagtcccggctgatgagatgaggctggggggccgccccaagagccacaggaggaagggcacatgcgcttctcaaaagttccttgatgtgtgatgtatagggatcactcagggaccttgccggaaagcccctttgtcactgtgcgtgacctgcttgttcagttccccaagcgcctccagatgcttgtgggattcaagatgggggctggccacatgttgctggaaccagcaccctgtgacatttatgcaggagaacatgggtatttgaagggtcttttgttcctaggacagccctgcctgggggaccctgcacacacagatcctgcacagatgtcaggggcagccagtgctgagtaccacagcccactttaggttttgtttcaaagcaacaaacgtcgctgtcatcaagtgagcaaggcagcctacgcaggctgccagcaccgccccagcaccctgcagtcccaccttccagcaccactcgtcacacacccttggggaaggctgctttgccagaactcggccccccaaagtctctgttcctagagcagaatttgtccctgtgcctcacccaaagagagggaagtcatagcccagagtcaccgatttatttgacttttttgtttttattatgatttgcaggattttttccaagaagtaaaatgcaccatagttacaaaatgcaagcattcaaacttacagtctttttaagaaatcggtcaccatccctccctcatcttcctgtcacacaccacccccacccccacaccccaccccaccaccatccccagtttgtcatgtgtccttcaggacagtcatgcacctaaatatttattccacgcagatggggggcgtgcaggcctcaaaaaggccgtgtgccttgcttttctcacttagtaacacaccgtggagaccttcctccatcagcacatggagaattttccctttttgtgtgtacatgtgtgagagggagtctcgctctgtcacccaggctggagtgcagtggcacaatctcggctcactgcagcctccgccttccgagttcaagcagttctcctgcctcagcctccaagtagctgggatcacaggtgtgcaccaccacacctgactaattttttgtatttagtagagacggggtttcaccatgttgctcaggctggcctcgaactcctgacctctggtgatccacccatcttggcctcccaaagtgctggggttacaggtgtgcaccaccacacccagccagatgtctgcttttaaaacagaatctagtcgcatcttcccacctcctttggtggagattgtcccttgcagatggtgcagggtactcctggtgccgcagtcctgtgagaggtgatctatatgtgcctttccaaagtctcgacttctacaaaatgctattccatccttggaagttgcctgttcattgaccaattccttaaagtggacacaaaaccttgagcttccagagtaagactatagggcctaggtcattgcttaggccatttggggccaagctagtatggaaccaggccaactaggctagacacagccggcgaggctgagggctcacataactctcgttcttcccgtcgctttccctggaccctccatcctggtgctccctggtttccccttctgaaaaggcccgacaggcccagtccagcttgtagacacatcccgttctctccccttcaggctttccatagaaaacagaatttacagcacattgggcattcagtacaagaggcaaaagtaggtcataggagcaaatgaggacttcagttttcagtggttgaattctagggaaggaatgaagaagcttaaatgcctagaaaccctcaggtgattgcagaaaggggggtgggaataaaacaagggagtccacatgctggtgtggtctctgtgccactcacagagctgatgtccgtaatccttaatcagtaagtgaggccgggctcagtggctcacacctgtaatcccagcactttgggaggccaaggcgggtggatcacctgaggtcaggagttcaagaccggcctggccaacatggcaaaaccctgtttctactaaaaatacaaaaaaattagctgggtgtggtggcggatgcctgtattcccagctactcgggaggctgaggcaggagaattaactcgaacccagaggtggttgcactgaggcgagatcacgccactgcactccagcctgggcaacaagagcaaaacttcatctcaaaaataataataataataataagtggaaatggttcccttctcttacggatggagtaaaccaaggctcagagataaaaggtgatttgccccaatcaagaagaaggtggtggccaggcgtggtggctgacgcctgtaatcccaacactttgggaggctaagactcaaggatcgcttgagtccaggaatttgagaccagcctgagcaacatagcaagaccccatctctacagaaaatttaaaatttagccgagcatggtggtgtgcgcctgtagtcccagctactcaggaggctgaggcaggaggattgcctgagcccaggagttgaatcagcaaatcagtgacagcatggaagccacatttactaggtttggctgttggaaaatgtgtaatccacctggcctaggctgcatggagtgtccatgctcctttgaaacctcttctggtctaaattcagtgaacgtatacacactggcttgaggtcctctgcctgctacagggcagccctgcctttcagctgtcacggccccccggagccatgccgacacccaggccccagccccatgcggactggcccgagggacctgccccgctcccggtgaggataaggaggggagtttcttaatggcattgccctggatagattgggagccaggcaggaggcttccatcggggcctcctctagattttgcgtttacttcttccctttggaaccggattcctaaatatagcccgagtctgaattggcagatgttgggtctgtcctttccttgacggccaaaattagtctgtcatttggcacctaaataaagcagccaaactacctttataccagctttgcaattaggcggtagttggaacattctatttgataaggaaacttttatggatgccttagcagcacctctgaacccaggaggctgaggagagaggacacccgggccccagagggacactccttcctcgccatcaggccttctcattccagagttaaggtcaattttgttccatgtggcttaaaaacacctcgtgaatgtggaaaagacagtcaatgctccccagaaatagcattctaagagcatggcaatggttactccaactttttttttttttttttttttttttttttgcaagcaaagaaaaatctgtccagagtgcctggagctgggttagtgcagggactccccaggggcagcagaaagatgttataatcaattatcacatcataacactgatgtatgataattactgagtgtttctcctgagatagtgcagcatttggctgggatgccgctctttcacggtccactgcctgattaatatgcaaataataggctgattgcatgatgaatgcagaaatgagttcgctgataacgtgagcaccgaagcgggaagatgataaattacttttactgactgtcctacattaagtaccctttctcaacaatttcatcacaaattaagtaaagcagtatggagagattaggaggacgtgtaaaataatgtaccttaatggtttttctaataccatcgtggaagacgaaaatctcaacttggttctgcccgggtctttgtagggccaagtgagttcactcacctgggcattgagtggaagacaggaggcaccccaccacaccggcgtgttccacgggccatgatcagccatggattctctgaggaatatcccattgcagcccagacattacccgcacactgggccaacaggcagcatcatggagggaggaggacaggctgctctcggggcagacgcagcatcctccacacagatgggcacccccaagcctgctgtccaccatgtgcctgcaggaaaggagcatttctgggctgcaggcctggaagactcggaaagaaaacaacatttaagacctcctgcctgggcacagtggctcacgcctataatcccagcactttgggaggccgcagcgggaggatcacttgaggccgggagtttgagaccagcctggacaacatggggaaaccccatctctacaaaaaatacaaaaattagccaggcgtagtggtgtgcatctataatctatagtctatagtcccagctactttggaggctgaggcggaaggatcattggaccctaggaggtggaggttgcagtgagctgagatcacgccactgcactccagcctgggcagcagagcaacaccccatctcaaaatttaacaaacaaaaaaagacctccttgacctctttttagctcttccaagtctcagaaatctggaaaaattaatttcactattagaatggcagtgggcacaccggccagagagcatgacttggtaagggatgggtaggtttgtccaaagccagaattgaacccttgagaaaaagagggcgtgcgtgtgtgcgcgcacacacacactctcccccccacacacacacacccacacacgcacacacactcccacacacacactctcccacacacacactcccacacacacacacacactccccacacacacacccccacacacgcacacacacacactctcccacacacactcacacacacacactcccccacacacactcccacacgcactctccacacacacatgcacacagagtcccacacacacttctgcacacacacactcttccacacacactctcccacacacacactctcccacacacacccccacacacactctcccaccacacacacacacacattctctctccctcacacacacattctctcacacacacattatctcacacacacacacacacacacatttgcagtgattaatctttgattacagcaaagcaatttaactagaggctttgttttttcccgtcttagtaatatatatttagactgtttgtatgacatacattttgtcttaatgcacagggacgcattgataagtgttcgtacacacagctggcttggtaataaggttattgaaggtaatttgaaagcatcatttctaaatcagtatggatctgcagaaaagccggaacaaggcgagcctgtgcccctgaagcagggccatctgtgtcacccagtgtcccttcagcaatctggccagactgagttcactaccaaaatcgaattgtaatttaagcagggtttttaatttttaatatcttcaagctctgcttttgatatgcttatttccttaagagcttataaaagatacacaagccaactgagcccagagggaaagtgactttccactccgaatccccggcaggtcccctccccgcccgcgggtgagctctggttctgcgcaggttcccgccaaccacagggcctcatcacctctgcagcttcctcctcgtgcatttcaggccaacacagaatttctaagatcatttctccccaccgtaccttcccatgtcggggagatgaaagaggagagtcgaaaaccatccccagagggagggaggctccagatggatgccatggtgtctagagggagggaggctctggatggatgcgatggtgtctagagggagggaggctctggatggaagcaatggtgtctagagggagggaggctctggatggacacgatggtgtctagagggagggaggatctggatggacgtgatggtgtctagagggagggaggctctggatggatgtgatggtgtctagagggagggaggctctggatggacacgatggtgtctagagggagggaggatctggatggacgtgatggtgtctagagggagggaggctctggatggatgcgatggtgtctagagggagggaggatctggatggacacgatggtgtctagagagagggaggctccggatggatgcgatggtgtctagagggagaaaggctctggatggacacgatggtgtctcctctagttagaggagctcatggttgacttctcagagcaacttctcactcgcttggcagcagggacctgtcacacccctgtgctgtggccaggaccatgttgcctgcactgctgcacctccagaccctgccctgacactgctctccccagaaacaccctcgtcccagactctttgtttgagtgacctgcttagtgacttcggcctcccgctttggttacaagatgtgggggcgcagggtctgccttgctcacggctgtacccccacacctggcacatggagggtttccccattgtggaaagctcaggtcccatcttcaagtaacttagaagtcaggtttggggaggtaaaatacaaatcacacaagttaaacaaccttgctctaattgaaacaggttttctttggggccagatatggtggctcatgcctgtaatcccagcactttgggaggccgaggcaggagaatcacttgagcccaggagttcaagaccagcctgggcaacatagtgagaccctatctcgacaaataataattatagtaaattagctggaatggtggtatgtgcttgtagtcccagctgctcaggaggctggggcagagggattgcttgagcccaggaggtcgatgctgcagtgagccgtgattacgccactgcactccagcctgggcaacagggtgagaccatgtctcaagaaaaaaatcaagagagaaagaattttggctcccatgtcattataagagtttctcgggcaaacctaaaaacatatattgttggccaggcacggtggctcaggcccataattctagcactttgggagtctgaggcgggaagatcactagagtccaggagttcaagaccagcttgggcaacatagtgaggccccccatctccacaaaaaattaaaaataaccaggcatggtggtgcacgcctgtcgttccagctactcaggaggcaggggtgggaagatcacttgagcccaggaggcagaggctgcagtgagccaagattgcaccattacactccaacctggacaacagatcaagaccctgcctcaaaacacacacacacacacacacacacacacacacacacacactatggctatatagttgtcacacagacacaccccagcacctactaggtaccagagactttgagttcatcttatcctattctttctttagtccctgcagagggtgtgtgtgtgtgtgagagagagagagaaagaaaatcattgctgttccattttatagaagaaactggcacccattggtgggggtgggggggacattgatctttcctggagtggggcagagctaccacccatcccctctagttcctctgaggcatcttccctcccactccaacccttctccacctcctcccccacaccccctacagaatctttctcaggttctttctgctgttgaaaaacagtgatttgataggtttggggctggcaagggatgtgcccaaagcttgatgctgccacttgtaagggcacagaccttcccagggggcagaaggccaacccaggaccctcgggaattggaccttcgcgtcggccccccgctggcgtcaggcatagctgctcaccttcttggaaagaaagccattttgtagtttggccacgctgggtacgtctctgatattccttaggatgttgttgggctacttttgtttctttcatggtaaggaaacgtccagtggcccaggaaggaggtgcagaaagctcatgagtgtctctgtgacatctgctaaagtcgctgcatattttgtttcaagctcttgctaatcagtcaagatgccagtcttactcaaaagaagaatactgtaggtttttatatgggcgatgtctaatggagatggaggactgttccgatggagattcagcagggctgtgagcttctgctgctggattcagaagcaaggcttgggaactgaggagcccagcgtcgctgccatggttgaggaaagccttggtgttcagaaatttcggagctggtcatgcaagggtgtctcatgtttgtgatatgagcctgtatgaccaaaatacaggaggccagggccgggcacagggccgggcacagtgggatcacacctgtaatcccagcactttgggaggctgaggcaggcagatcacttgaggtcaggagttcgagaccagcctggccaacatggcgaaatcccatctctactaaaaatacaaaaattagctgggcctggtggcacacacctgtaatcccagctactcaggaggctgaggcaggagaactgcttgaaaccgggaggcggaggttgcagttagccgagattgcaccactacactccagcctgggcagcagagtgagactccatctgaaaacaaaaaacaaacaggaggccaaatgagcattgctgttcccctttgatgctgagaaactcactccaggcgtaaaccaccagggggtgtggtctgtttagagcacagggtcagttccggagcaggtctggtgcccacatcacgatctgtccctctaaacctagctaggaagtatccaggctggtggccaccctgttgtgtcttctgaagctgtcagcaccggtcgctggaaaggcccgcaggctgggaagagtctttctgagcctctagggctcctgccagccccggcatgcccacaccgggcacctcagagcctgccgtgcatccttgtatcttgcaccagtccccgccacctccaggcccatccctccctcgggctctcctttcctctcctccagggctcccttgatgttttttatttgtgtttttttattttgtattttattttatttacttatttatttttttgagatggagtagctgggactacagacatatgccaccacacctggctaatttttgtatttttagtagagacagggttttgccgtgttagcagggctggcctcaaactcctgacctcaagcgatctgcccacctcggcctcccaaatgttgggattacaggcgtgagccaccgtgcccggctcccctgctcattcacacttaatgtgccaggccacgaccacctcccctctcccctctcccctaacctcctccctccttccacccgcccttccatacgtgtctgtctgtatagtcattggaatttcctggcttggcatgggctcaaagccgaaaccatggacagaatgaaaagtggcgcatcagaccagccgccagttaaataatgtttgggttcttgtcagaatgtcacggagtaccctgtcattttgtttcagcaacttgtccttctgaatgcacagttcgccttatggcatgccagcagtaaaaatgtcacttacaataattactttttggtgaaaatgcttgctgacttcccaccttcaagctgttttttacacagtggggagataataagaaacgactttatcctgactgctcaaatgaacactaaatggaatttgggttcttattactgcagatagagggccgggtatggaaatttcaacagtagatcggaagaactgcagagagatgtatctccgagaattacggcgggtgcgggttttcaattggctcccattgaaaacttaaggcagctgttgtttgcctgctgtttttggaatataatatttttcataatccttttatagttcgtgaatgccttgtgtatctcagagggccttgagtcactatctctgctttctgtagcttgctcaccaagctcctcttatgccagattcagtgccttgtaaaaaaaaaaaaaaaaaaaaaaaattaattcacatagatgactttttaaatgtaacaccttactattgctgtcaaaactggatggatggtactgtgcagtggggcttttaaaatatgcaaattacccattttcaattgtcctggtcctgcaggctgcagggtccttggaagcgaggtttttgtctgatttctcccttatccccaagacacagagtaggtgctttaaaaatatgtgagtaggctggatgcggtgactcatgcctgtaatcccagcactttgggaggcagaggtgggtggttcgctggagcccaggagttcgagaccagtctgggcaacatagcaagaccccatctctctacaaaatatacaaaaattagccaggcgtggtggcacacacctgtggtcccagctactttgggtcatacattggcaaggaggctaaagtgggagggtctctgaagcccaggaggtcgagactgcagtgaaccatgatcacaccactgcattccagctggagcaacagagcaagacctcgtctcaaaaaaaattaaaatgagagtgaaatgacgcaggaatgacggtaggctgcaattcagaatcacgtggtgttggcagatagcaggatgggtaggaaggtcgaggttttcccctcctgatccttgcaccatctgtgtgactttaaccaagtcacgttgcctgtctgagcctctgttttctcacctgggatgtagggtgtaaatttccaccccagggaccattgggagaattgaatgaagccacatgcagacgccctcagctcgctgctccattcacgcctggtatgaaatgtgttttggttcccttccacaatcctatgagtggatcagctttttgtgactcatcgttaagtcttcgagattcacgcatgtcgatatgtgggttgtagaaaaactgtgcctgggaaggcaggcacagtcactctgtcactaacgcacacttgggcgcagggtgcaggcgccaccagctgtacaggggctgtttagaatatggcccatccacctagctcctggctgtgtgtctcggggcaccgtatcttttttttttttttttttttttttttgagacagagtctcactctgttgcccaggctggaatgcaatgacacgatgtcagctcactgcaaccgccacctcccaggttcaagcaattcccctgtctcagcttcccgagtagctgggcacgcgcctggctaatttttgtatttttagtagagatggggtttcaccatgttggccaggctggtctcgaactcctgacttaaggtgatctgcccacctcagcctcccaaagtgctgggattacaggcatgagccactgcgcctggccagggcaccatattttacctgtgtaaaatgtgggaagtggccgggcacagtggctcacacctgtaattcagcacttttggaggccagggtgagaagatcactcgaggccaagagtttaaggaccaacctgggtaacatagcaaaaccctgtctctattttttaaagtttaaaaaaagtttaatgttttaaaaaagataaatgcatcatacaggatgtggccttttgagtctgtcgccagcgtccctgtcatgtgtcaggcattgtgggagaaatagcactcagtcataagatttatgttgactgtaggtctttatagaaacaaatacatttgaccaggtgcagtggctcaccctgtcagggtggcgagggtgaggggaccctctgtgcagcggggagagttggcttcctgtaggattcactgtctgtcctaacagaacaaaaatatggtcaatagaaaagaaacattacttctcctttcaaacattagcagatggagccctgtgattaaaacgatactttctgaaacaacaaggctttgctctgttccatgcaattaaaaataataataaaaaaagaaaaaaagggtcaggcgcggtggctcacacctgtaatcccagcactttgggaggccaaggtgggcgggtcatctaaggtcaggagttggagaccagcctggccaacattgtgaaaccccatctctactaaaaatacaaaaattacctgggcttggtggcacgaacctgtaatcccagctactcgggaggcagaggcaggagaatcgtttgaacccgggaggcggaagttgcagtgagatcgtgccactgcactccagcctgggcaacagagggagactctgtctcaaaaaagagaaaaagaaaagaatgactttctccccaacatgatgttctgagctcgtggattcacggtgtctccaacgcgtctgtttgctgtggcatctctccatgcctgtgcaaaaaacatgtactcaatcctgtttctttgacctgagaccatagccacaactgtgcatgcagatgtctgttggcgagtaaactatctcccaggaagagcatgcagcttccagctgtcttctacattttatttatttatttatttatttagagacagagtctcactctgtccccaaggctggagtgccatggcacgatctcagctcactgcaacctccgcctcccccattcaagccattctcctgcctctgcctccccagtagctgggattacaggcacccgccaccatgcctggctggtttttgtatttttagtagggagggggtttcaccacgttggccaggctggtctcaaactcctgtcttccaagtgatctgcccgcctcagcctcccaaaggtcttctgcattttagactcagattgagagtggagagacagatacaagccacctccagcaaccagccgccacatgtcactttcacatgcctggacctctcagggctcggacagggctttgatctcagggggcctgcctttgtctgtagtcacagcctggagcacagagggacacctgtaacagtagtgagcgcccctgtttagttctcctgggggttcatgatggcacaaatccacgccactggcttgcaaggcgcactggaagaaagaactgtacagcctctgagtttcgtggtggctctgcctccgccagcacccagaacaaaacagggagatgccacagcagccggcaccacactcggtttattagccagacagccatgatgttgaccttgctgtgggttaaaggacacaaaacctgaagagaaatctgtttatcatttgggaaattcatgccatccttgacagtatctggtgagcaagatggatgatctgccaggccggcccctcgcatgggtgaatcacgccatccttacggtacggttcctctgccggcttcagacacaaaaataacatttgtggggttttatatccagttctctggtgacccggggggtgagcagagagaagaaatctgatttgtaagattcacattgccctaaagatttatacggaccatttctgcctcttacgcttgtctcttctacatctttcaaaaaccggtttggcatgtgtttttctctttgtaacctgatttcccaggtcaaggacacagccttatgcgatggcggaagtttgtgccggttcaggacgataaacgggttgatcgcttaagttgcaaatgttttatttgaggttttgctctttctaggtatgaatacaaaatattccttgtagttggaatgtatttatggcaggttagtgtatcctggatacagtatgtccagaaaaggactcttaagataaatggtaaattgaagttaagttgctgctctatgctacattttcttttcagccaggtaacaagtattttgggctatctactatggtgctgatgttgactgagtgacctgctagggcccaagggagaagcagcaagagtaagacccttggccaggcacagtggctcctgcctgtaaacccagcactttgggaggccaagaagggaggatcacttgaggccaggagttcagcctaggcaacatagcaagacctcatctctacaaaataaaaaattagacaggtgtagtggtgcaagtctgcagtcccagctacttgcaaggctgaggtgggaggattgcttgagcacaggattttgaatcagccagggcaacctagcaagaccccatctccacaaaaaaaaattttacaagaccctgggagcagagagcatggcctgggccctcttacctggcactgtggggtcttactctgtgtcaccctcagtgggcatcaggggagagattgtgccaagacactgagctgggccaggggcagattctgccttgcaggcaggacctcagcccgaagccacatcttcctccaggacagtttctatctgcagaaattaggaaatggtctaagtctttatcccagacatcccagaactggaatccagcctcttttatcaggttttatgggctgttatcagaggccagagggatcactcaccaacagagcccagctggcatttcccactgggcacccacggcgaccccaacaaggcagaggagagtgtagactctggcttgtccacaccagcccagtcacttctgctgttggttacagcatggcttataccagcaaagagctcggttttcagaagcaggcagaaccagcaagtcccaaggttggaggtagaactctaaaatggaagagctggggaaacagggtgctcctcctctccttgcctctctccatcttcccctagagttgggtgctgtggagttctctgctcttcacaacaaaaaaacagctgggcatggtggtgtgcacctgtggtccaggaggagccgtgattgcaccactgcactccagcctgggccaccgagcaagaccccatctctaaaaacataaaagtaaaaataaaccaacctaggtcctgagacccagtgctggaggaccagaagctatagccttatgtttccgcagttgttgttttttttcttttttgagatggagtctcactctcactctgtcacccaggctggagtgcagtggcacaatcttggctcactgcaacctccacctcctgggtgcaagtgattctcctgcctcagcctcctgagtagctgggattacaggcgtgagccaccatgcctggctgatttttgtatttttagtagagatggagtttcaccacgttggccaggctggtctcgaactcctgaccttagatgatccactcgcccagccacatttcctcctaagggtcttcctaactgtggtgactacgtattgtgggcagccctcatttaaaacaatctgtctatgctttttgttctggaaaatatggacaacataactacacaagttatgatctagccaaagtgcttctgaattaccaaattatggggtttcattagaagaaatgacagcgataacatgattaataggagtttttttagcagaatgccctcatgttaagccttccgaagcctttcttttaaacccctagtttttctcgcaatgatgttatttttgttttttaatatggaagactagaggttactctcagtcaaaaaaatatgaaacagttcactaagacccacagaaaaccctaccgtctgcttctcctacagagcgtttaattagtatttcctagataaggaacgtagatggtcgtggtaaaagacagctattttcaggcacggtttctcgtgtgctttaattacagaaagcactccaaagacctccgccagctgcagccctgcccctgagtccccgatgagttccagtgagtcggtgaagagcctgaccgagctggtccagcagccctgtccccccatcgaggcgagcaaggacagcaagccaccagagcccagtgacccgccagcatccgactcccagcccacaaccccgctgcctctctccggacactcggccctcagcatccaagaattagtagccatgtccccggagctggacacctacggcataaccaagcgggtgaaggaggtgctgacggacaacaacctcggtaggttctcctctcggctgctgagtcaggaggtggcagggagtttgcaggaggagcaggtgaagggcgggccctaggccaagccaaccacagagtctcaacttgtgtaggcaccctttgagaacatgaaacatcctatagttgtgaacagtaaggagcgtgccgtctgcaggtcagtccccacctcctccccaccctgcacccccacggggaccagttagaagatgagcatggagtcagagtggactcgggaggatccacacagactgtctcttttttttctttttttttttttttttttgagacagtcttgctctgtcacccaggctggagtgcagtggcacaatctcagctcactgcaacctctgcctccccggttcaagtgactgtcgtgccccagcctcctgagtagctgggattacaggtacctgccaccactcctggctaatttttgtattttcagtagaggtggggtttcaccatgttggccaggctggtctcgaactcttggcctcaagcaatctgcccacctcagcctccaaaattcttgggatcacaggatcccaagccaggcatgagccatcgtgcctggcttagatgtatctcaatagagacagtctgagtaagtccagatttcttgaggccacagtctgagaccagcctgggccacatagcaagaccccatctctacaaagaattttaaaattagctggacatgttgatgtgcacctgtagtcccagctactcaggagcctaaggtgggaggatcacttgagcccaagagttcgagaccagcctaggcaacatagcaagaccccttctctataacagatttaaaaattaggccgggcatagtggctcatgcctgtaatcccagcacattgggaggccacagcaggaggatcgcttgagtccagccaggagttcgagaccaacctgggcagcatggcaaaaccctatctctacaaaaaatgtaaaaattagccgggtatggtggtgcacgcctgtagttcagctactcgggaggctgaagcaggagaatcgtttgaaccctgtagttttaggctgcagtgagctatgaccatgccactgtacttcagcctggacaacacagtgagattctgtctcaaaaaaagaaagaggtagacacccattagagcctggcatcctcggggctccagagctgggcagcgtccacccggcagtgccaggatggcttagtggaaggtctaacggaccccggttctcactctgctcactgagtccgtgatgctggccaggctgcctgcattctcagatccccctccacgaaactggagtaaccacgcctgcctgggagcagtgagtagcagcattttctagcaccaggcccgactggtaataatagtcattgttattttatcattgctgttcccgctgccttgcgaagccatctccatttcacagcccacagctggggcgggcagcccctggggaactcactccgtcaccctggcatcccaccgtgcctcagacctggcctcggcctggcacatgctctagccccctgggtgctcggcctgggttggttgtctgtgctctgtgtcactggtcatcagctgctgtggctgtaagaatgttacggtgtttcatcttttttttttttttttttgagatggagcctcactctgtcgcccaggctggagtgcagtggcgcaacctcagcttactacagcctctcggctcactgaatgccgggttcacgcgattctcctgcctcagtctcccgagtagctgggattacaggcatccgccaccgtgcccagctaatttttgtatttttagtagagacagggtttcaccacgttggccaggatggtctcgaactcctgacctcaagtgatccacccacctcggcctcccaaaacacagggattacaggcatgagccaccgtgtctggccttttttttttttttttttttttttgagacagagtctcaccgtctcactcaggctggagtgcagtggcacaatcgcggctcactataatcactgcctcctgggttcaggcgattctcctgcctcagcctcccaagtagctgggattacaggtgcccaccaccacgcctggctaatttttgtattttcagtagagacagagtttcaccatgctgccaaggctggtctcgaattggcctctggcctcaggtgatccacccaccttggcctccaaaaatgctgggattacaggcatgagccaccacaccagccaagcctattttgtcattttaaaccaccgtgctcctccagtgtggtgttaaccaggcagggttccctggtttaggcacgcggagattggaaacccaccctttctatctttatttcccaagggtgaaagtcagttaaaggggcagtgttctctgcagagcatgtaagcacaaccctaccgagtggttgcagtttgtctgctgctcatggaaaggccttgtgtgtcttttctttctcccatgggatgagaagagaagggaggccgagcatggtggctcacttgagaatgacaggtggcctgtaaccctagcactttgggaggctgaggcaggtggatcacctgaggccaggagttcgagaccagcctgggcaacacagtgagaccccgtctctacaaaaaaaaaattttttaaaaattattatccaggcatggtggcacccgctgtaatccctgctgcttgggaggctgaggtgggaggatcacttgagtccaggaggttgaggcagcagtgagccacggtggcatcactgcactccagcctgggcaacagagcaagacactatctcaaaaaaaaaaaattaaaaaaaaaaaaaagaacagagtagctgagttccactaaagtttgctcagtgatctaacagcctggaggttaggccagcttgtccagtggaagcctcccatccccatgtctgtatgcaacagacaaaacagaatgagagaaaaagtcatatcaatgagaccttatataattaagtcaattcataaaaataaaaatgtagctgttgatttgaaaaaatggctaattcccatatgttcatcagttattgaatcatgcagggattcctagacttgagtcatctcccacttcatagctcgtcacacatccaaggaagcagaccagttgcatcactcctgcccacctccttataggaagtggcatttcgtgtaaatgttgaaaatcagatagggtctagctctgttgcccaggccggagtgcagtggcacgatcatagcttactgcagccttgaactcctgggctcaagcaatcctcccacctcagcctactgagtagctgggactacaggcacacaccccaagcccggctattttttttttttttttttttttgagatggagtctcgctctgttgcccagggtggagtgcagtggcgcgatctcggcttactgcaatctccgcctcccaggttcacgccattctcctgcctcagcctcccaagtagctgggactacaggcgcccaccaccatgcccggctaatttttttgtatttttagtagagacggggtttcactgtgttagccaggatggtctcaatctcctgacctcgtgatctgcccgcctcaacctcccaaagtgctgggattacaggcgtgagccactgcgcccagcctttttttttttttaaatagagatggggtttcaccatattgcccaggctggtctcaaaactcctaggctgaagttatcatccatgccaccatcattgctggagttttccttgatgttggttttactgggtgaaggtttgtagctttcttcaggctctcaaatgggtctgtagccccaaaacaattaaaagtcatggctaggaaacatctaggagtcatacagataattttccaggaataatcatctgatttttttttccccattcagctgggaggcctaagcaaagagcaactagctattcatatatattgctttcccgaacatagcaagctccttgaaatgaaaatagattcttttaccatgttagcattaagtaaaattttctctttttttttttttttttgagatggagtctcgctctgtcacccaggctggagtgcagtggcacgatctcggctcactgcaagctccgcctcccgggttcacgccattctcctgcctcagcctcctgagtagctgggactacaggggcccaccaccacgcccagctaattttttgtatttttagtagagacggggttttactgtgtgagccaggatggtctcgatctcctgacctcatgatctgcccaccttggccttgcaaagtgctgggattacaggcgtgagccaccgcacctggccaaaattttcttataacaactaaaaaaaaaaaaatcataaggacttgggacatttataggctaaagagtttgaaaagcagagaaacacaggtttacaaaatcagtaaatttatctttaagttttttgttttgttttgttttgttttttctttttctttttctttttatcttaagtttaaaatgactaagccaggcgtggtggtgcacacctgtaatcccagctactcgggatgctgaggtagaacaattgcttgagcccaggagctcgagtccagcctgggcaatatagcgagaccctgtttctttagggaaaaaaattaaaaagactgataagaaattaatgtctcagcttcagtgctttctaggcagtaaacttttacttggaggcccccttcttagaagccagtgtgtggtgtttctatttcacatagaggatgtaagccacagagagaacaagccagccctctgtcgtctccctgccccggatggggagaggtgccttctgttctgtacactttatggggtcaaacgctggcccctctgatcccagtctccacttccacctaataagtcctgttcattcaagtactcccgtcaggccttccaggttatcactgatcctaatttgtatctttacaagcggtggccctctaaaccagcagcggaatggccctcagagaagtgagcctttctttctaagctcctgacaagcattgccaactcaatgcggctgtgctctccatagcgaaatgccctctgatcagcctgtgaagcgggctgcctgcccctgcctgggagaagaaaaggtatcaggaaaggggttttgatccacttccagttactttatttagcaaaggcagcctagactgcaaaagcagactttggaattggaatcggccggcctctcagaaaagcagagctgggcagctccctctcctctgtcctgctgtgattgtgggttgcctgccccgttttctcagcgagacctgataaccttgctaattgtggaaggagacgcaggttgccctctgatttgaggttgtacaagagaggtctcctgtttgctgtttggcctcctgagctctggcttagagatttcactgcctctgagaaacaccacaggtgttagcgtgacctcagcacatacaaagcctgaaggcttttttttttcctttttttttttttttttgagacaacggtctctctctctgttgcccaggctggagtgcagtggtgcaatcatagctcactgcagtctcaacctcctgggctcaggcaatcctcccatctcagcctcctaagtagctggaactataggtacatgccaccacgcctagctaattttttgtgtgtgtatttttgtagagactgagtctcactgtgttgcccaggctggtctcaaacccctgggctcaaatgatcttcccgcttcagcctcccaaagggcccttccggccaccgcaccaggctgaaggcttaagagaaacgtcactggccagatgcggtgactcatgcctataatcccagcactttgggaggctgatgggggtggatcacctgaggtcaggagttcaagaccagcctggccaacatggcgaaaacccgtctctactaaaaatacaaaaattagccaggcgtggtggcgagcacctgtagtcccaggtactctggaggctgagacaggagaattgcttgaacctgggaggcggaggttgcagtgagccaagattacactactgcgctccagcctgggtgacagagcaagactccatctcaaaaaaataataataataaagagaaatgtcattggttgtgtgtacggagaatgcaagagcaatgccaactccctggccaatggagagtattataagtctggttgaagatatatttctaccacatgtttgctgtaagctaggatgtcaccagcccaaccctgagcctttaaactcctgtgtctgattttaaccttgacacgtacttgtcccttcagatccctggctctcggtgacaatacctgtcttgcttctgttttctctctaggccagcgcttatttggggagaccatcttagggctcacccaaggctctgtctctgacctccttgcccgccccaaaccctggcataagctcagtctgaaaggacgagagcccttcgtccggatgcagctgtggctgaacgaccccaacaatgtggagaagctgatggacatgaaacggatggagaagaaaggtaagtctccctgccccgcccgggccggctgcgtccgcattcatagacaggctgtttctttcaaatctttcacacacagctgatgagggacattgacccatgaccaagggaccagaggacagggcaaaaatatttttggatggtcatcagctaatgagtacctaagagggctggaaagttgtgtaactttttctctccagcagcctgaatctaaagatttttttagcactgggagcacttttaaccaaggagagcgaaacagctctgggggcgctgcatttggtttttgtgttgtgtgggtggctgatcgggctatcacagcatttactgagcatgtaccaggtggctagaggccttcctttgttatcagagagagaaataagaaatgcattttgtaggcagggcacggcggctcacgcctgtaatctcagcactttgggaggctgaggcaggcggatcacttgaggtcaggagttcaagaccagcctggccaacatggcaaaaccccctcactactaaaaaaaaaaaaaaaaaaaaaatatagccaagcttggtggcgtgcgcctctataatcccaactacttgggaggctgaggcacaagaatcgcttgaaccctgcaggcggtgaacagagattgagccaccgcactccagcctgggtgacagaccatgaccctatctcaaaaaaaaaaaatgcattttgtagatcaggaaacagaggttcagagaggttcggtgcctccaccaaggtcacccggcctggaaagtgacaaagcaaactcctgccacaacagatctctctcttgctgttatttcccagcctctggggatttggcctccctagaggaataaccccacgtgcacccacatgtcatctcgaatgtggattcatgttcttcttgcagcctgtaggctacagcataggaaaaatgcctaaagccaggtgtgctgtgcctcttggtttgcagtttctaagcgctggtcctcgccagtgagtccgcccctcgagcaccctcagtcctcaggtcacctatggtgctgggagctcactgggcggctgaactgcatcccttaggggcagagactgggaaccagctgctgccggtctgaccgtaagaagcggcagcctccctgatcagctaacgcagaggaccttaactaagagtgggcatcccaggggccgggcacagtggctcatgtctgtaatcccagcactttgggagtccgaggcaggtggatcacttgaggttcagagttcaagaccagcctcagcaacatagtgaaaccccatctctactgaaaaatacaaaaatcagccaggcatggtggcgcacgcccgtaatcccagctacttgggaggctgaggcaggagaatcgcttgaacctgggaggaggaggttgcagtgagcagagatgacaccactgcactccagcctgggcggcacagcgagaccccatctcaaaaaaaaaaaaaaaaagaatgggcatcccaggcccttgagtggctctgccccagcccaccccacccccgtccccgccacacacacacacacacacacgcgcacacaacatctgagccaggggtgggtatggaacccaggcctgtcagttcttaattcacccagaaattccagccaagcatcgccgttctcacccaacccgggaaaggactgctgaaggagagagagtgtctggtgcctcctccaggaaccctatgggggttcctttataataatagaggcttctattttctgagaactgccctgtttgccaggcactgcgctaagactgctgttcatccacacgactctgcttagatgtccttatccaggaaatacgaacctcggtgcttcatgcagcctagcagatttcaatagctcctatcagtagggaacgggaattcatactcagggctgtcagatttcaaagcagatgctcttaaatatacatccgctgcctctgtgctgcgagctgcccccctgggatgacccaggggcactgctgctgcccactgatgacctgcccaggtggtggcctctgccccattcagggcccctctagcgagctctggcctgcccttgggcctgtagtctaagggtctgaggtaggccatgcctcttgggcagccccaggcagcgctgtaagctgcagaggcctggtgccacattgcccccctaaaagttttcaacttatttttcgttttgttttttgttttttgttttttaaagtctcgctatattgcccaggctgatcttgaactcctggcctcaagcagtcctcccatctcggcctcccaaagcgctgggattacaggcatgagccactgcgcccggccttttcaatgtcttattatgggaaatctccaacataaacaaaagtagagaaaatgctgtcatgaacccaatagatctgtgcagagtttcccgtgatcccctcacccgagcagcgtgaagcttcctgcactagccaggaggcagccctcagcccttaggagggaggaggccctgacaacccaactccctgctgtgtttctcaccctggggcccttaggaaaggaccttagtccccgcaaatacatctccagggcttcccaggcctcccatctttccctcggcacaggctcggggcgccctcttgtgttacaaatgaattactgtttctgcggggcccagacctttccaaaggtgccctagtatccaaagccgctgtggtccgatggccttctcttcactcctgggggtgccggccacaaaggctgctccctagagaggccttctccagccccctgccagcccctggtcagtcgtctgtcccctaggagggaactggagggagtccccacggttggacaatccaactcctttctctggatccagcagctttgactccgctgtttgggttttctatggggaagatttaccttctcaattgcttctgagttctcatgacaaaatggcaagttaattaaggaaatcccttgcctaagctgtttattttatttttttagagacagggtctctgttgcccaggctggagggcagtgatgcaatcatagctcactgctgcagcctcggtgttctgggctcaagtgatcctcccgtcccagctactcgggtgcacgcagcctcggtgttctgggctcaagtgatcctcccatcccagctacccgagtagctgggactacaggtgcacgccaccacactggctaatttttaaattttttttgagacagggtctctctatgttctccaggctggtctcaaactcctaggctcgagcaatcctcccatctcagcttcccaaagtgcagagattataggcgagagccaccacgcccggcgatgtccttcaggattcagtttaaacatcatctcttctaggcaacttccccttctgcctccccaggtgtagggaccagccccacagggtctgtgggtctctccccgtgtgtggagacgagagagtatagaaataaagacacaagacaaagagataaaaggcagctgggcccggggaaccactaccaccaagttgtggagactggtagtggccccaaatgccaggctgcactgatatttattggatacaagacaaaggggcaggataaggagagtgaaccatctccaatcataggtaaggccacgtgggtcacatgtccactggacagggggcccttccctgcctggcagccgaggcagagagagagaggagacaaagagagaaacaacctacaccattattagagacttttagtactttcactaatttgctactgctatctagaaggcagagccaggtgtacaggatggaacatgaaggcagactaggagcgtgaccactgaagcacagcatcacagggagatggttaggcctccagataactgcgggcaagcctgacaatgtcaggccctccacaagaggtggaggagcagagtcttctctaaactcccccggggaaagggatactccctttcccgggatactccctttcccggtctgctaagtagcctgtgtttttccttgacactgaggctaccgctagaccacggtccgcctggcaacgggcgtcttcccagacgctggcgttacctctagaccaaggagtcctctggtggccctgtctgggcataacagaaggctcgcactcttgtcttctggtcactcctcactgtgtcccctcatctcctatctctgtatggcctggtttttcctaggttatggttatagagcaaggattattataatattggaataaagagtaattgctacaaactaatgattaatgatattcatatataatcatatctaagatctatatctggtgtaactattcttgttttatattttattatactagaacagcttgtgtcctcggtctcttgcctcggtacctgggtggcttgccgcccacacccaggcctggccgaggaactcttctcagtatccccatggtctcttgcacttacttacccccaccccacttttcactctgctgggaacatctctctggatacttctctgcctcccctactaaactgttaagttgtgcagggacaggtgaggacctgacattccgtcagagcaggtccttggtgagcatgtgctggtaacagaatggctctcatcttagcgttgtttcttttgttttgttttgttttgttttgtttgagacggaatcttgctctgttactcaggctggagtgcagtggcaccatctcatctcactgcaacctccacctcccaggttcatgcaattctgcctcagcctccctagtagctgggattacaggtgcgtaccaccacgcccagctgatttttgtacttttagtagagacggggtttcaccatattggccaggctggtcttgaactcctgacatcaagtgatctgcctgcctcggcctcccaaagtgcttggattacaggcatgagccaccatgcccagcctcatcttagtgttttgagatgctctatgcaaagtcctgcaagccggcactgtgccgtcccgctagcgggactggggatttgggctgctgtcccagctgggcctgaccttagtctgccatctcttcctccgcagcctacatgaagcggcggcacagctcagtcagtgacagccagccctgcgaaccgccctctgtcggcaccgagtacagccagggcgccagcccccagccccagcaccagctgaagaaaccccgggtggtgctggctccggaggagaaggaggcgctgaaacgagcgtatcagcaaaagccatacccgtcaccaaaaaccatcgaagacctcgccacccagctcaacctgaaaaccagcaccgtcatcaactggttccacaactacaggtacgacggctggctcacagggagcgccggtcggcccaggggaaggggctgatctgtccggaggccgccatggcgcacaggggtgaggctggggccggaggtggggcgctgggagctcggtgattggtccgttccttggtcccttagggttttttttttcttttcttttcttttcttttgagatggagtttcaatcttgttgcccaggctagagtgcattggcgcaatctcggctcactgcaacctccgcctcctgggtttaagcagttctcctgcgtcagcctcccaagtagctgggattacaggcatgcaccaccaagcccggctaatttttgtatttttagtagagacggggtttcactatgttggtcaggcttgtctcaaacatcctgacctcaggtgatctgcccacctcggccccgcaaagtgctgggattacaggcgtgagccaccacgcctggcagttccttaggtgttattggaggttttaactgcagagatgtaaggccacgtcccttcccgtcactgtcacatagttagaaacaggtggtatctgccatgacccagaaagaaaatcacctctcgattacatcatttaataagggagagtgtaggcattcatggttcaaaaggagtgaaacttttgtggtttagtttatatatatctatatttatagttatattcatatttatttatttttagagacaagggcttgctctgtcacccaggctaaagtgcagtggtgcaatcatagcttactgcaggctggaactcctgggctcaggcagtcctcccacctcagcctcctgagtagctaggatgccaatgcaccaccatgcctgctgattttttatagagacaggggtctcgctctgttgcccaagctggtctcaaactcctggcctcaagcagtcctaccacctcaacctcccaaagccttgtgattatagacatgagccaccacacctggcctgaacttttatttcttagtgattttgcagtgctttctcggggtcttctgccatgttatcttccaaattagtttgattagttctgtaattaaataaatgaagtcatttaagacctttgcatttgggaaagttcatgagttaatgaagacagattgagcatcttctagatctcagattctgagctaagtatttcaccgagttatatcacttaatcctcacagctcacaaatgtatatgagataccttattcttgtcattccttttttgttgttgttgttgtttgagacggagccttgctctgtcgcccaggttggagtgcagtggcacgatctcggctcactgcagcctccttctcccaggttcaagcgactctcctgcctcagcctcctgagtggctgagactacaggtgtgcaccaccacgcctggctaatttttgtatttttagtagagacgggtttcatcatattggccaggctggtctcgaactcctgacctcaagtgatccgcctgcctcggcctcccaaagtgctgggattacaggcatgagccaccgcacccagccagttctcttcattctacagatgaaaaatatagaactcagaggggctaaggaggtcaggccccagtgctgtcttggtagaacaaagtgcactgggatgaagtgtttggagtagatggaggaaacccactgaaggatcctgagttgctgatcatagctataaccatactctctgctgctagaaaccaagaattccagggccctgatggagatccctaagctagtgccttgccattgaccatctcaggtgctgcttcccattgtccctagggcacgataacattggggtaggtgctcctggttcaaccaaggtcaccctacgtaggtctagccgatggcagtggggccctcccagctgtgcacatgacacagtcatgggcagcacaaagtcacagtcaggctggaggggaagttgtgtctctcaccgggccctccctcccccataaggtccactggagttcctaaaggggcccagtaaaccacccaggctctgaacaaattgggaaactaaaatattaggtcagagtccaaatcacacctttattgcccatagaggcaaagtcacaagatgctgctcattgtgagaactgagcgcacctgctacgtggaccctagactcaggcaaacttccccacaatggcagccctggccccgcacaggcctccccgtgttccagctacctcccgcaaggacaaaatccaggattagccaggcgtggtaacacgcacctacagccccagctactcaggaggctgaggtgggaggatcacttgaggccagaaggcggaggttgcagtgagccgagatcacaccactgcactccagtctgggtgatagagccagaccctgtctcaaaaaaagaaagtccaggagctgcacagccagtttcttcattccaaatttagcaatcagatcaaaacagaggcagagggaggccagcagttagaacagtggaggtccctctacttggaaggaaacttcaacagtaatgaagcagaatgaaggaaatgaacggaaacgtggacaggggtttcctgaagcttctctttgccaggtgccatgctatcccatttccactttctttctttcttttttttttttttttttttttctgagacagagccttgctctgtcacccaggctggagtacagcagcacgatctcggctcactgcaacctctgcctcctaggttcaagcttctcctgcctcagcctcctgagtagctgaaattataggcacccaccaccatgcccggctaattttttgtatttctagtagagactgggtttcaccatgttggccagactggtctcaaactcttgacctcaagtgatccacccacctcggcctcccaaagttctgggattacaggcgtgagccaccacgcctagatgccatctctactttctagccacagagatgcgtgcactttgaagtctcctgcaattcacatccattttagggcatgtgtgataacgctttctataatatagacacatgcaaagccctaggttaccatctgggcatagatgctaccaattatacaaaacagttccaaaagtatgttccctggccctgctggagccacgtttgtttcccaagtcccccaacaggcctcagctgcatggcagtcactgccccctggccagggtacacaccctcgggtttctcagtttgctgcttgtcttgctggtcttctgacagtcatacccgtcacactgtagtctgcggtcattgtggggatgcctcttttgtgcattttagcactagcaaattcagtggtacacctgtggcaaagatagagaaggggagagaagaagaataccagtaggacctcaaaacttagtaagtaaaatttagtaatcacaggtctgggctgggtgtggtagcttatgcccgtaatcctagcactttgggaggccaaggcgggtggatcacttgaggccaggagttcgagaccagcctggccaacatgatgaaaccccgtctctactaaaaatacaaaaattagccaggtgtggtggggtgcgcctgtaatcccagctgctcaggaggctgaggcaagagaatcgcctgaacctgtgaggtggaggttgcagtgagccatgatcataccactgcactccagtctgggtgacacagcgagactctgtctcaaaaaaataaatgaatcccaggtctgaatccagagtagacactcaacaaatgcttcctttcaaaaataactccacaacaaagcaggctgggctgagtcaaatatgggatccaagagatgagtttgagctgcagagatctggaaaaatatcatggaagaggtatgaaatgagcaggctcttgaaaggaggattggagtagagaagaattttataagcaacgaaacaggtggaaggagaaacgaggggccgagcacagtggctcatgcctggaactccaccacattgggaggctgaagcaggaggatggtttgaggccaggagtttgagaccagcctcagtgagaccctgtctctacagaaaataataataataataataataataataataataataataataataaaataaatgaaggagaagtgagcattcaaaattagcatgaagtcgcttgtctaagatcacccagcaggggcgggcttggtggttcacgcctataatcccagcactttggaaggccaaggcgggcagatcatctgaggtcaggagttcgagaccagcctggccaacatggtgaaaccctgcctctactaaaaatacaaaattagcccggtgtggtggcacatgcctgtaatcccagctactctagaggctgaggcaggagaatctcttgaactccggaggcggaggttgcagtgagccgagatcacgccattgcactccagcctgggcaacagagcaaaactccgtctcaaaaaaataaaaataaaaataaaaaaagaccactcacccagcaggccaagggcagagggcagagcagagatgcagactgagtttcttctccaacactttggttctttcactaaatgctttgtacagaccaacctgccgttatacccgacagagcttcccgacactggatgtgttaaatccctaaccaagaacgtagttttttacgttcttttctcaggggttaaacaggaaaagtagattttcttttctcctgtcccactggaaccctcagggagtaacacttggtgtcaatttttgccccctcaaaaaaaaaaccgagctttatttcctcttatcctttcactttaagggaattagaaatatctctggctaaaggcaattaaaaatatctcaggctgggccgggcacggcctgtaatcccagcatttggggaggccaaggtgggaggattgcttgagcccaggagtttgagaccagactgggcaacatagtgagaccacgtctacaaaaaatagaaaaacaggcgggcgtggtggtgcatgcctgtgatcccagctactcaggaggctgaggtgggagaatcacttgaggaggttgaggctgcagtgagctgtgatcatgccattgcactccagcctggggaacagagcaagaccctgtcccccagcaaaaaaaaacatatctcaggctgaccatttacccaggattgatgacgagattgccagaacaacatgccacaggacactgctctcccctggaaaaacaggtccacccagttaggaactcagattctgaaccctcgcagccacggcattctgcgagccttgtgtgacttccctaaaaaccacaactgctcctggaagctcatctttctaggccagaagacagtattccttagaaatatggagacaaatctaggctaaaaaggatgatgtctcacatctgtggagcacaaagcatgtgccaggcactgagccaaaaaggtttttgtttgtttgtttgttttctgattttggttttggttttggttttttgagaaagggtctcgctctgtcgccgaggctggagtgcagtggcaaaatctcagctcaccgcagccttgaactcccaggctcagccaatccttccatctgagcctcaggagtagctggggcttcaggtgcatgccaccacacctggctaattttttgtatttttctgtagagatggggttttgctattttgcccaggctggtctctaactcctgagctcaagtgatctcccacccaggcctcccaaagccctgggattataggcatgagtccctgcacccggcctgagcagacagttttatagatatatcatcttattagtccctccatcagcacccaagtgcagtgctgctggccccattttacaggcaaagtctgcacacaggggccaagctcatgagcatggaaacacaagccccatgcctaacggtgtccgctccccaccccagccttagggcttatcacagcacacaaacagcggctggatagggggaagggtgacccctttttgaatggctactttgggtcctacatcatacatttaataccttatttaatcttaataacttctctgcaaggaagataccattctccacatttttcagacaagaaataagaaaactgaagttgtagccaggcgtggtggctcacccctgtaatcccagcactttgggaggccaaggcaggtggatcacctgaggtcaggagttcaagaccagcctggccaacatggtgaaaccccgtctctattaaaatacaaaaaattagccagttgtcgtggcacgtacctgtagtcccagctatttgggaggctgaggcaggagaatcatttgaacccaagaggcagaggttgcagtgagctgagatcgcaccactgcactccagcctgggcgtcagagtgagactcccttctcaaaaaaaaaaaaaaatgaaaaatgaaattttcttatttctcacagaatgctatggctatgaggttaaataacttctccaagttgcacagctagtaagcaccttagccagatatccaacccaagtgtgcctgcttccaaaaagcctgtactctggttttgggtcgggctgggaccaaaccttcactacccatatagcctcccgcctccccaaccagaataggtggggtggagagtttcaccccaactagcagtctcactgccaaggaacttgaaagccatagcgcccaggaacctgttcacagaagccaccatttcctgggctcccaaggtagccccagggaagggggaaagacttacacaccttggaacttctggggggcttctcagaacctttcctttctgaaccagagctcacaaatctttcaggacaaggttcagagctcactgcacgcaggaatcaaataactccatagcagattcacaaccccctgcaccccaccagagttcaataccctgggctaagctacagtaggatcttccccaggggagtccccacagtcagcacaggacccggcgcagagtaggagcccagaaaacctttgttttttttttcccttgagacaggatcttgctctgtcgcccaggctggagtgcagtggcagtcttggctcactgtaacctccacctcccaggttcaagagattctcctgcctcagcctcctgagttgctgggattacaggtacctgccaccacgcctggctaatttttgtatttttagtagagacaaggttccaccatgttggccgggctggtctcgaacgccgggcctcaagccatctgcccgcctcagcctcccaaagtgctgggattgcaggcgtgagctaccatgcccagcctcagaaagccttattggccgggcttggtggcttatacctgtagtatcaacactttgggaggccaaggcagcagaatcacttcagcccaggaggtcaagtttgcagtaaactatgatcttgcccctgcactccagcctaagcaacatcatgagatcctgtctctacaatattttaaaaatttaggcatggtggtatacacctgtggtcctagctactcaggaggctgaggcaggaggatcacctgagcctgggaggtggaggttgcagggagctatgatcacaccactgcatttcagcctgagtgacagagcaagacactgcctctaagtaaaataaggaaaggaaaaaaaaaaaaagaaagaaaaaatacagaatttggtggaattccaccctaccctggaccacaagcccccaacctgaccttctgtggctcagagattaaaattgtcactttggccactatccaataattggtcctctctcctgaagtcctgatggatgcagcggttatcaggcagtttcactgatgaactcacccagccttcgttactgcacaccaggcgccagtgcaaggcctgggtgtacaaagaataaataggaccttgcctttctcagtctagttggagcgggatgggatgggatggaggaaacgtgtcactcgataagaaccctggccagaagtggtggctcatgcctgtaatcccagcacttggggaggcccaggcaggaagattgcttgagcccaggagctcaagactagcctgggcaacatggcaagactccatctctttaaaaaatttaaaaattagcaagcatagtgacacagttgtggtcctagctactcaggaggctcagatgggaggatcactcaagcccagtagttggaggctgcagtgagctgtgatggcaccactgcactccagtctgggtgacagaacaaggccttgtttccaaaaggtttttgaaaaataaaataagtggccggacgcagtggctcacacctgtaatcccagcacttttggaggccaaggcagatagctcatgtgaggtccggagtttgagaccagcctggccaacatggtgaaaccccatctcttctaaaaatgcaaaaattagctggatgtggtagtgggtgactgtaatcccaggtactctggaggctgaggcaggagaatcgcttgaacccaggaggcagaggttgcagtctgcggagattgagccactgcactccacctgggcagcaacagggaaattctgtctcaaaaaataaaaattaaaataagtgcccgcggcaatttgttgcagtggagaataggggagtggtgtcccagccctgggatggctcctggccaggcccggaggggtgggtggtgactctggagaggggctgccccgtggcccgagggtcgctggaggggcacggaggggcctccaggctggacggagcaggagccccagagagaggggtctggctggggtagcaccagaggccctttccccagcagcacccccctcacgtccccgccgcttgttgtcttgtaggtctcggatccgcagagaactgttcattgaggaaattcaggccgggagtcagggccaggcgggcgccagcgactcaccctcggcccgcagcggccgggcggcgcccagctcggagggcgacagctgcgacggcgtggaggccactgagggcccaggcagcgccgacaccgaggagcccaagtctcagggagaggccgagcgggaggaggtgccgcggccggcggagcagacggagccgccgccctcggggaccccgggcccggacgacgcccgcgacgacgaccacgagggaggccccgtggaaggcccggggcccctgcccagccccgcctccgcgaccgccaccgccgcgcccgcggcccccgaggacgccgctacctcagccgccgccgcgccgggggagggccccgcggccccgagctccgcgccgccgcccagcaacagcagcagcagcagcgccccccgcaggcccagctcgctgcagagccttttcggcctccccgaggccgcgggcgcccgggactcgcgcgacaaccccctgcgcaagaagaaggccgcgaacttgaacagcatcatccaccgcctggagaaggccgccagccgggaggaacctatcgaatgggagttctgaggggccgcggccctggggcgggcagccaggctgggccgcaagggcctggacggggtcggacggggcaggcgctgcggacaccgtggcctgggcttggcccgcggcctgcaccgaccccgggccggacctgagcccgcagcccagaccccctccacggtccgcggcctgcaccgacccgaggcccagatccaaggccgcggcccagacccactctgcggcccgggccgaccctgcggcctccaccaaccccgcggcccagacccagcccgcggcctggacccctggaccgctttgcgcacttaccgccctgcgggccacagggcaaaatcgccataggccaaggtgcatatagaaaacaaaggagcattaagcccaatctatgtcgtgttttcaaggaagaaaacggaaatgtgtggtcgagcttttttgtaccctgaagtgttttttttattgccctaagtgatttccacaggttctggaataactcttacagctttgccttgtgtcctcctgttccgtgtgggctttaaaagaaaaaaaatcaaacccacatattaaaagggggctttttatctgccatctaatggcttcagagcgataatacactattatcttcttaaaccaggaaaaaataaaagggggggtgggatttttcagaaaaattaaaaaagaaagtttttgtagctgttcagttgccactaagagattgcacagtcaaaacgactctaaacacactagtttggattcctaaatattttcaagaaaagaatcttctcgtttgaaactttgaattaaaataaaacacatttactccacatattttttaacaaaaagaaaacgtcacatcaggaaactctgattttgtggtagctgacatagtgttttcttgtacgtgaatagaatcctgacatgtagtgcacattgatgtatagctttaactgaccctgggttttgcagaccagggtttgtttaatacactccattctaggccaaatcaggacaaaaaaaagaaaaaaaaagaaaaaaaaaaaagaaaagatccgaatctaggtattttataatctgctttttaacctctaaccgcagagcacgctgatcagacctcatatcttggaggtttaggagacaagttagaactgtagcatgtacctgttaattttgtttaatttatggtgtctcaatctgtctgtgcgtctgcacgtgtgcaagcattgaaagaaaggagagagtagtccgggcgagcacagcaggcagttccagggccagacgggcccatccccaagtagatagcagtctacggatctctctctggcacagaaggcacctcacctcacaccactctcctggatacctgatgaactgagccctcccaggggaagacactccccaggcctgggcagggcttacacgcgcactctctctcttctttccctttttcttcccaccgcaagcactgatgaccctgttgaactcgtgggaaacttcctttctctgcaggagagagaacgtggcattctgggctccccactcccatccctgtagaaatggcccaaactcacaccaaaacgtggatgctcttcaacttccaaacctaccatttgcccttctttcatttcgcctcttagttctttttatgcacagttttagggcagtctaagtacaaactgaaagtctaacttgtctctgattcctcccttgtctatgtgtatatgcgtgagaatagaggcgggtgagagtgtgcgtgcgtgtgcgtgtgtgcaattttatacgtctgtgtattttcttaagtacctgtgcacacgtagagtgcattactgccacctttttcaataagctgttttatcagttacggcttctacaagtttgctaatttagacttctttattgccatatctttaaactaacaatagatgatttcggtatatatatatatttttttttgcttatttataggtgctgtattttattatctgattgttaggaagggatgaaaggggcaaatattctttagagggatagactgccggcagtattgggtataatttacaagatgtagttgtcatactgtatattactgattgaaaactttttgaccgtattgtgtatcattgaaacctttgtcttaggtcaacatctttggatgacattttaatggtgcattcattatttcttaagtttaattaatattacttttttttttatttggggggtgggagggagttataattttaaaggtatgctctggctgttccacctccgtgtgcttgttaattaacttgtaggactttgactgtaagatgtgaaaccacgtttcttgcatgatgttttagagattatttcatttacagtcttttaacctgcagctgcagcacttagttcacgttttcacaaatttcaagagtcactacactaaagacaatgccttttcatgaataagaagttttcagaaggctctagggggctgggaggcaggctgttcgtttgtcttttgttgggggtatcatttctgaacttgaaatccagttcagggagaagagaattcaaaattagaggagcttaaggggacacgggtcaacatctagctcgattcaggtgcattgagaagagtgagttcacatcggtgacccttaggacagtgagtggcagagccctgacgactgtggtgtcctctccacaaaaccctcaagggacttttgtcatcatgtgtgatgaatctttaaatatcgtctaattttcataagaatgaaaagaagttaacaggaaatagtaggctagggtttagttttaaaggcatgactgttatttacaaaggtgttaaatctgaggaaattgacaaatacagatttgtccattctagtggccaaacagtaacagtctaaaatgcagtcattttgaccctcccaagcaatttagtcatatgtgttgttttctcttttctgtttttacttcttagatttttaactaggttactgttggttcccattctgtcttttttgccagacttacatctggtgccagatacaatcagttggttaaattttgcttgcagttctgtgtattttttttcctctattatttatttttttaaaaaaaatagagatcctaaccttagatctttgatgtgaagctagcactgtctgtaatacttctaagagctgccactaaaataatacagcaatccgtggccaggggagcaccccctcctggttgggcccctcagttggagtctaagggttaatctctcatcttgctaagcagtattcaagtgccttgaacagtgtcccctcggcatggctccccttcagcaggctggcattccaagcagtggcccccgcaggcagccgacccccttcctcttcacgctctatgagtttaaaaagctgatttgtacctctcccctgggggaaacggttccatataaaacactaacacttaattacaagctccattatgccattttaaatggcttctttttgttaattggaggcattgttcataacttaaggcttttgccattaacttagctggctaagcagaggctcggggtaaaatcagtgtttgcatttagcctcttgacccggagttccggcccaagctcccttgtgatagccgagatggcaggtgtgtgagttctgtcctagacctgtgcccaactcacttccaccccagaggagtcttctgtcctcctccccaacccccgagctccctggtaacctcctcttgaacttctgtatcagtgaagacatctgtggtttctgctcaccagacctctctttagaaagggttatcagagccatggagcttagctcaattggattcttctagacgatcttaggaggcatcttggcatgaggcagcttctaagcgtctcctgggacaggattggggtgacagcccagggatgcatgcatgggagaactctctgagaaatgccaggatcgtggctcacagggacccaccatcaaaacctgctactttgtgcaagtaattgaggcaaaagataccagtcgacagcctccctggggtagatcccttgtacctccaaagtacaaatacctccctgctcagtttccttcctgtcgccatctttgttttcttcccattgaaaaaccatcctgtctgatgtggacgttcaggtctgctggttggcggtccgggcccagagtgcagcagagctctgggttaaatattcctttctggccaccgcccaagcccaggtggccagctctcataccccatctccctccttggccagggccagcatcaggcgtgcagctcatgaccagtttacacaggctgcaaagagatcgctgtgggcctcggctgactactttaagattatgccacagccaggccctaaaaagagaggggaacaggagtccccaggtgagctctctgacgggcaggtgccttcccgactaaggttggactggatgactttgttcctcctgcatgcatgtcctttgatgcaagggtgatcaatgaactctgttgacattctatgcaatgtttttcattcctctgattttagcaaagcaaatcttactgaaaaatagcagagccaggggaacagacgcatgtccttctgggagtcacacaaaagcagagagattttgaactgaggggcgacagcctttgccttaaatgcagtatgacaggcgcttcttggcagaccagtaaaaacaaaagcccatagaccttactcatcccaaggccgacaagccagctgtacagggcgagatgtagcaacacggggcatgagcggtgggcgtgctgggctatttgctgtggtactttaggctggaggtttggctcctgtgctgccggtggggggccctgtccctccccagatgtcctccctcttcttcacactcctcattgtcccttctacctcactaacctgtcttctccatctgatgtcacccagaaccacaccccacagaactgtgaggcacgtgggctggagagagcagaaaagctgccagcgcagcagacacgaacatccctctgcctggtgggccggctttgtgtgtctctccttttgtgagcgcaacacggacaaacagctgtgctctgcaaggcacacggatgtttcccttccacctgttcccaaagctccagcagctgtttcttttgcaggcagggcgtggtctcggggctccgagggtcttgtctttggtccgccttcctttctgtccagtcctgctcagctgttaagatccatcatggccattatccttgtcccggactgccccaaagttcccagctggctttggggaacactgtagctcttgggtgtctcttgtctctggcatggttttagcgtcactgcgaacactcctttgcaaacatcaaacatctcaaagacggaaaaggatagatggcttcctccagcctacacgccccgtccacagtggcatcaccctcttatcccaaaagaatatgccagttcccatccagcaccgaagaaaatcagctcctggggctggtggttggaggtgggtctgtccactgtgggggccaaagtgttcccctgctggagacagtttgcaagtaagaacctaaggatggggacagcatcctgtgcttgggcattgaccagccaaagctcacatttagaaagccctcagtgcttctgtggtttcacctgggcatcgacgacattagggaagcctttgtgaccacaagggcagggcttgtgccctgagtggcgaggtggtgacctgaggccagtgtgatgtggttggatctcagcgtgtactgaatgccagtctggccggcacactcgaacgctaagagaatggtccaatttgatgatcttatttctatttcgatcaggttttgactttttgtagatgaaaactaccagggaaaaggggaagcaggtacccaataaagtttagaaagatccagtctgtgaaacccttagagatgggctgaaagttaagtccaccaacccttgggcttaatcaggacggaagaggagggggtgtggggggcagagcgtaaaacaagccccagccctactcccggccccccagcccagtcttcccaatcccagaggccccggcggcctgtgctcctcaccaccctggtcaggggaatagaaggaaatgcaatttccgcctgtctgcccgacttccaaaaactgcctcctcctgcccaggcctctcccaccaccaccttccctccaaagataaccgtgtccatgccatccgtggcatcatctcgagttttcatttttggatgaagtgacatttagctttaacaagacatttccaaagcgcctagtctcctccaaaatgctaactttaaaagttgggcattgtaggcgaaaaatcccaaaaaaaaaaaaagacaaaaaaaaaaggctggcgagagaaagacatttggctatgcataaatgtgcacttcccccatgcccccgttcttaaactcttaagatgcctttgagttgcttttcatgaatccttttagtttacccgataatgttaagaaagcattagtctacgttactgtaatttctgtagtgtttacgctttaatttctaccacaaaatatgctatatgctatgtatcaagctttctgtaatcagaaagaaaaggtgccttatatcccaatgtcacggctacatccctatggaaattaatcagaagcacagtgtgtacggaagcattgggacttctgctggtgaaacaagagaccattcagcaagacacattgaagtggcacggagctgcttttgttttataattcttttttccccccttttccttcttcttttttattattttattattttttttgtactttgctttaaacggaaagcacttaaatagatgactatgtgtaaaagctctgtgcaattgaaatcatttttcttcattttaaaaaaataacgtattgcacaccaaatgaactcaaagtaagctttagaccaggacgattcaggttatgaatgagtttgttcactgtagttccgtttgttcatgaaccgaagggaaaacaggcctccccgactccctccagtctcccagcctgcctcttggtgaccactgtgctgggcgtgcagggcccgcgggctctggccggagccgctggcctgacgaggcaggatagggagtatccgtgattcagaagctgagacccttccccagtgtctgaggccacagccatcccttccagcacttaatcttgtcttgttgaaatggactgactgctactgacctgccggcgtgcgtgagggtgattataaaaggatgtttccttgagaaaaaaaaaattatttctatcctcttctatttattattaggttaatcatttaagtacttatcaggagtgtattgttattttgtgttttgttgtcataaatgctttttgctgtcactctagtggttactatcctctgccttcctctcctcccctactcccccagagaaccaaggcgtctgggggattgactggggggcagagggggtttccccagcaaaatcaaacacctgtctccagagtagccactcaaaaactggtggtctctatgtgtctaactttttaaatgagagtgtttatgaacaaaaaaatttaccaacgtgtgagggagttgctgagttgaagaatgctcgcttgaggagcttcagaggaatcttagcaaagccaagttcagttccccaaagcctcctagagcctctggtaagacttctgggttcatgaagtttcggcgagccgtggtcagagagggcgcggtggcctggccaagactttacctccaagcgagagagtgatttcttgcaaggcccgcatgggttgatacgttttggttggttttttgttgttgtttttcttgcgtacaaagttggtcaaaaccatctttcaaagcaacagtgttttgtagtaccaggctgtggcttgagggctcacctaggagatcataggcagagggcccctttcccctataggtggttcaacgtggaggaaggttgggtgtggagattgcttgctgtggccccaagctcagccagcaggacacccagttgttgccaatcaggtgtgaaggtgaggcgccctgccttgatcccatgggcccagcagaaggaaacttaccccaggccaaggcaagggccctgctcaccccaaggtaggctgggaagagcatctctttccatatcatcacctccccttctccaagattgccgggggccctgattttgttctctctttgaaagaaaccctccaccgaaacaatggtccccatctccccagaagcctttttttttttcatttttctctaattagtctatgcatttctctctctcaaaccatcttctgcctcttcccttgagaaaacgggcatctcacgtacccccatctgagacctcttggaaaaaaaaaatcccgtgtattctggagatgtgagaattcacccaaaattcttaaaacattggagaatagcttgttataaaataaaagtgggggtaaaaagaaggtggttttccccacatccctttgcattgaataagagacctagttctttgcgtttgtgcaataactctttgctgcttgccttgagagcgggtagcaccacgctcctgtccagactactaacagcacaagacgcactcacagggtggcggaatcttccggaaaactctctataagctcagctccccccaccccacccccactctagcgttttgtcacgtcttacattttagcagtattttatattttctgtaacgcaccaagtcttagatctttctagagcttgtttgttcatcctcacaatcacagatttttttctccaatcctcacagagacccaattgaccaaaaaagaaaaaaggaaaaaaaaaaagtcgtcttttttttttttttttgtacaaatcgctttgagatgcctctggtgtgttgctgtgtgacatctctctggtaacattttatttcttgctatttgtttttctacattaagagtcaaagttgacctggctggcgtgggggtgggggaggcacccgtcggccccttggtgttgtccctctgtctttggttagccatacgatgtttgttctcagcactgtacaacggtccctatataatacggagaagcaatatcactgtatgagactcacaccatgtattattattcactagcaccctaggtgtgataattgaagtaaatatcttttatacaaacacaagaatgtgtgggttgtttttatttaaagtgctctggcctgaggacgagcagcaaacactgtcattcgaggtccaaagggcacctcaagaatcgccgttcccgaggtcgtcccctttgcacctgtccgcaggtcctcgggcgtgtggcttccgggcacacagaaaaccgtgtggttctaggatacatggggatctcgggcactgctctgtcaatctgcatctggttcacaggaagggcttcgccagggcctgcgttcctacttgctgttgtcaccagcactgtttgcctacccttgaaccaagcccttaccctccctggcgtccgcttccttttctgtaaaatggagacaccatctcctgtcatataggcttgctgtggggaaccaggaatggtggccagtgctggtgcggcactgggctggtggtggcagccccaatcgatggcacttgggcgaccaggactacggccagtctcctctgccgtgtggcctgcagctggtcagtggcgtggcctcagccttctgtgtgggggtctcactgtgcccctgactcctgatgtaacagaaagacaagtgaaaggcaccagttaatgcttgcgagtgggacagtggcttgcgggtctctggaatgacggggctactgagaagagtctctttccagatggcgctcgggctggaggtggggggagagctctgcagaggtggctgttaggcttctccgcgcagttgtgactcagaggctgttgctcgtcttgggttggaaaagagctgtctgccaggccgacgtgtgtctggtggaagtgggggatgacttggtcgcatattaatttggagatttcagattgtgaaatgtccacatgtgatacagaatcgtaagcccctctcccaattcaactggattcaatcctccctccagtgggagaacccagagtatgggatggagacaccccccagtgccaggtgccctcggcagccccgtgtctgatgcagtcacttagggccgggggtgtctctagagttgcccaaaatgctggtcccctcagataggagaggcctgcataaaaccctaagagctggcccagcgcagtggctcacgcctgtaatcccagcactttgggaggccgaggccggtggatcacttgaggtcaggagttcaagaccagcctggccaacatggtgaaaccccgtctctactaaaaatacaaaaattaaccaggcatggtggcgggtgcctgtaatcccagctacttgggaggctgaggcaggagaattgcttgaacctgggaggcagaggttacggtgagccgagattgtgccactgcactccggcctgggcgatagagcgaaactcagtctcaataaaacaaacaaacaaaaaaataaccctaagaactctgccagtttggtatttgacagactgaagtctaacgtggttaatttttctgtttgctagtttaggtatgcccctatgtatttcatgatctgctaactaaattaaaataagaaatgttaaaaaaaaaaaaaaaagaaagaaaagagaaaggaaggaaggaaaggaaggaagaaagaacagttgggcacagtggctcattcctgtaactcctataggcccagcactttgggaggaggtcaaggcaggaggatggcttgagcccaggagtttgagaccagcctgggcaacatagtgagaccccatctctacaaaaaataaaaaattagttgggcatggtggcatgtgcctgtagtcctagctactctggaggctgaggtgggaggatcacttctgcccaggagttcaacgctgcagtgagctatgatggcaccactgcactccagcctgggcaacacagcaagaccctaaatcttggggggaaaaaaaaaaaaaggaacacttagctcaaagtctttttcctcagaaagttgagacaggatctcagtctgtcaccacctcctcctcccaggcttaagcaaccctcccatctcagcctcccaagtagctgggaccacaggtgtgcaccaccacgcctggctaattttttgcagagaaggggtttcaccatgttgcccaggctggtctcgaactcctgagctcagaagatccacccacctggttctcccaaagtgctgggattacaggcgtgagccaccgcgcccggccccttatttgttatttgtttcgtttcgttttgtttttaagatggagtctggctctgtcacccaggctggagtgcaatggtacaatctcggctcgctgcaacctccaccgcctgggttcaggcgattctcctgcctccgcctcccaagtagctgggattataggtgcccgccaccacacctggctttttttttttttttttttttttttgtatttttagtagagatggggtttcaccatgttggccaggctgatctcgaactcctgacttcaagtgatctgcctgcctcagcctcccaaagtgctgggattacaggcgtgagccaccatacccagccgcgttccttatttgatgctctgaagaaacacaattgcaggtagacagggtggcgcgacgtgatgatgagatatattagagcacttgaattgtctgcaatggtcctgtgtgcttctgttacaaagcccctctgagtggctgcctgggggcatgctgctcctctccacggtcttaacatgccagctttgggggcacacagcttgctggtgtctacttcagctcatcactgattcctgtgaggtggcagaggcctgggcctgcatgtacggacccaaccagggaactgggagggctccacagagctaccgtgatgttgcccaggctcccggccagtgggccgttgcttagcaaccgactcatgcagtgtggagtgaccggcctccacagacaggggagacacagcctgggcccagccttaggcaggcattgctgaagttcctgtcttttccaagaagttcagactcttagaataccaacaggaagggccctggtcgagcatggtgggtcacgcctataatcccagcactttgggaggctgaggtggacagatcacctgaggtcaggagtttgagaccagcctggccaacatgatgaaaccccatctctactaaaaatacaaaaattagccaggcatgatggcacatgtctgtaatcccagctactcaggaggctgaggcaggagaatcacttgaacccaggaggcggaggttgcagtgagccaagattgcgccactgcactccagcctgggcaacagagtgagactctggctcaaaaaaataaaaaataaataataccaatacgaagagcccttttttttttttaagcagaatcaagtatggataagtaatagcagagcttcccatttggggcagtggtgtggcctccagggagcgggatttgaggacaaccctcccattgttcagggaggcgtcagtgtctctgtggtcaggagacactggctgtatcaggatcccagcagcgtctcttagtggctgatgaccgtgagcaagtcttaagtcgatgctcaggaaatctttgaaagaataaatgagtttaacttcctagtgcttctgtttctgtctctgtaaaggggatataaaaagccaaactcggtcgggcacgatggctcacacctgtaatcccaaggctttgggaagccaaggcaggaggatcacttgaggccgggagttcaagacccaccctgggacacatagcaagaccccatctctacgaaaatgtttaaaattcgccggatgtgctggcacatgcctgtagtcccagctacttgggaggctgaaggatcgcttcagcccaggagctcaaggctgcagtgagctataattgcaccactgcactccggcctgggtgacagagtgagaccctgtctccagttgaaaaaataagaggtaggtggctcatgcctgtaatcccagcactttgggagccgaggcgggtggatcacgagttcaagagattgagaccatcctggctaacatggtgaaaccctgtctctactaaaaagacaaaaaaattagccaggcgtggtggcaggcacctgtagccactcaggaggctgaggcaggagaatcgcttgaacccaggaggcagaggttgtagtgagccgtgatacctccactgcactccagcctgggcgacaaagcaagactccatcatggatggatggatggatggatggatggatggataactcacagggttactgagaggacccagtgagaagacctggaaaccactcacccagcacccagtggcagggcagagcctggaaggatccaagtgaggcctatgcagttactggcagtggaagcagcagaggactggctggccctgccagggtcttgctgcccgtggccaggccccatctcctggggtctttagtctcctctaacacacatggcctctgggtttggctgtgatggggtgggactgagccgtggtagatgcttacatcagacggattgcaaagagggccagctgtgccccagcctgggagaccctgcagctgtgggaatcccggtgcaactttccaactgaggaaacagatgcttgccgcggggtagtatccactcgcccgtgagctaatacataccgaaggctgaccgtgggccgctgccttacacgctggggttattacagggcaaaccaggagctcaccttcttgtgggagggacagacagtagacgtaataaataagtgaatgagatagttgcttcgaaggtgatcaatgttataaggaggatgggaagagcaagtgaaaagggttaaactttttttttttttttttttggagatgaagtcttactctgttgctcaggctggagtgcagtggcgtgatctcggctcactgcaacctccacctcccaggttcaggcgattctcctgcctcagcctcccaagtagctgggattacaggtgcatgccaccacgtccagctaatttttgtatttttagtagagacaggggtttcaccacattggccaggctggtctcaaactgctgatctcaagtgatccacccgccttggcatcccaaagtactgggattacaggtacgagccaccacacctagcctttttttttttttttttttgagatggagtctcactgttgcccaggctagagtgcagtgacacaatttcagctcactgcaacctcctcctcccaggttcaagcagttctcctgcctcagcctcccaagtagctgggactacaggtgcacactgccatgcccagctaatttttgttatttttagtagagacaggagtttcatcatgttgtccattctggtctcgaactcctgacctcaggtgatctgcccgcttcagcctcccatagtgctgggattacagatgtgagccactgcgcccagccgaaaggggttaaagttttaaatcgggtggtcagggtaggcctccctaagaagttcacttctctgtttaatttattatctttttctctttttttttgagacagggtctcactctgtcacccaggctggagtgcagtggtgcgatctcagctcactgcaacctccacctccggggttcaagcgattctcctgccccagccttccgagtagctggaattacaggcgtgcatcaccatgcccggctaatttttgtatttttagtagagacggggttcaccatattggccgggctggtctcgaactcctggcctcaagcgatctgcctgcctcggcctcccaaagtgctgggattacaggcatgagccactattcccagacagaagttaacttctttttttttttttttttttgagacggagtcttgctctgtcacccaggctagagtgcagtggcgtgatgtcagctcactgcaacctccgcctcccaggttcaagtgattctcctgcctcagcctcccaagtagctgggattacaggcgcccaccaccgcgcccggctaatttttgtatttttagtagagacggggtttcaccgtcttggccaggctggtctcgaactcctgacctcaggtgatccacccgcctcggcctcccaaagtgctgggattacaggcatgagccatcgcgcccagcccagaagttaacttctaaacagtactggcagagctgagggaacgagccctgcagatgtgagaaggaaggacgttctaggcagtgagaactgccagttcaaaggtctcgtggtgcaaatgtctctggaaaccagcatggccgcagcaccgtgaccaggaggaagagtgggaggcgatgaggtcagagagaccaaggagaggcggagcatgggggccttgtcggctattgctgaggctttgttttttactctgagtcaactgggaggcattggacggtttgaacagagggtcctggctctggtggggaaacaggaagtaggattcattggtaggagtgagtaaggaggggtcagcacaggggaagccctcagaagctcacccaggaggccacaactggggctgcgtttaacccccacagccatgccagatgagctgcttctcagccaccacgtgggatcgatttcttccacattgaacttggtcaaggcccgctgctttgtgctgtggatcttctggcagccagggaacttagacttggccctgcatatggcctcaatcacaccctcatggttctgctcttagtacggatagacacaatgacctggccaacataaaccctggctgtcacaccctggggctttccaagggcaccccgaatacttgcctggtgcctagaccacagacagcacgaggtcagagacacaaatgtccagtggaaagaattgtctccaacgttccttagggcaacccatgtaagaaacagactgtgtggccgggggtggtggctcacgcctataatcccagcactttgggaggccaaggtgggtggatcacctgaggtcaggagttcaagaccagcctggccaacatgaagaaaccctgtctctactaaaaatacaaaaattagccgggcatggtagcgggcgcctgtaatcccagctacttgggaggctgaggcaggagaattgcttgaaccccggaggcagaggttgcagtgagccgagattacaccactatactccagcctgggcaacaagagcaaaaatctgtctcaaaaaaaaaaaaagagaaagaaagaaacagactgtgtactttactgaggaggctgctgtttgcaaccactgcaccctacaaggtcactattttttttaagagacagggtctcactctgttgcccaggctagacggcagtggcataatcatcgctcactgcagccttgacctcctgggctcaagcaatcctcctgcctcagcctcccaagtagcagggacaggcgtgcaccaccacacacggctaatattttaattttttgtagcgacagtctggctatgttgcccaggctggtctcaaactcctggactcaagcaatcttcctgcctcagcctcccaaagtcctgggattacaggcatgagacagttgcacccgaccaactttttaaaaggctctctctggctgctgcttggtgcccagatcataggttgcagagggaggccaatgaggaggctgatgccatcatcacaatgagaggtggtcatgactcggactaggtggcagcagtggtaaaaagagactggattctggagatattttgaaagtagagccaaaaatgagacttaaggcaggggcagtggctcacgcctgtaatcccagcactttgggaggccgaggtgggtgggtcacttcaagccaggagtttaagaccagcctgaccaacatggtgaaaccctgtctctactaaaaatacaaaaattagccaggcgtggtggttcatgcttgtagtcccagctgctcgggaggctgaggcaggagaatctcttgaacccaagaggtggaggttgcagtgagttgagatcatgccactgcactctagcctgggtgacagagtgagactccgtttcaaaaaaaaaaaaaaaaagagagagagagagacttaagacagattcagcatcaggagtgatggagaggagtgaggctacctcccggggtttggtctgagccaccgaagggtcgcagagagctgggtcaggccgggaagggggtctctgcctatccctgcagatgtcacctcccgaggctggactacaggggtccacacttgggcttggggagtacagacttggggaggaagggatcaggctgaaattcagacctgtgaaggttgaaatgccagtagaagatcaagtagaagataaatccaaggagaggcgtggactggagtcccacactggggaggcatcggcttgtcaatggcatcccgcatggccagagcggatgagggggcagagtgaggcatctgcggatggtccctgtgcagcagcggcaagaagcttagcagggagggcaaggaccagtcaaggaaacagggcagagcagccagccggggaaggaggcccaggagggtcggtgacctggaaactagctgctaacacagcagctcagatgagagccgaaaaacaaggacgtggcaatgtgcggaggtcattagggaccttggcaaggacagtcagcgtgaggggtggcagagtctgatgggaagggcttgaggaattggaggagcggaattagacgcttgagaagagacagcttcttcaaggagttttgccagagtggggtcaagggaaggggcgtgtgtgcatgtgtacatgcctgctaggagaacatgcttgcatgcatgtagaaggcaagagccggtgctgcaggagagggtggcattgctggagaccccattgcataggggtgggggccagcacctgcaggcatggggagccggctgggggggctcagtggtcacctgaggctacctgcaggatctacaggtgcagaggcagggaggggtggatgaggcagcagcttggccccctcagtgtcctcctagcagagataccatgtgcaccgagcgtctccaccattcctacctggcctgcaagtgatttaataagacaggggcagccgggcatgtggctcatgcctgtaatcccagcactttgggaggctgaggtgggtggatcacctcaggtcaggagttcgagaccagcctggccaacgtgacgaaactctgtctccactaaaaatacaaaaattagccaggcatggtggtgcatgcctgtaatcccagctgcttgagaggctgaggcaggagaatcacttgaacctgggagagagaggttgcagagagccgagatcataccattgcactctagcctgggtgacgagtgaaactccgtctcaaaagaaataaaaaataaaaagacaggggcccctcgcgccttcaggaaaaccgtaggtacaacaccgctggcctcgctatgataagtctctgcatttaatccttctgcagtcagaaatcatgcctagactttttttgggcgtggtgcagagagggacagggtcttgctctgtcacccagcctggagtgcagtggtgcaatcgtagctctctgcagcctggaactcctggactcaagcgatcctcccgccttagcctcctgagtagctgggaccacaggtgcacaccaccatgcccggctaagttttgtatttttctgtagagatgacgttttgccatgttgcccgtgctggtctcaaacacctgagctccagcgatgctaccacctctgcctcccaaagtgctgtattccagccgtgagccactgcaccgggccctcctgaagtcttgaccttaaagatgctttgattccctcctcccctctgtgaggtgccccctctaggatgtctttgtgggttctcccagaggatgaggtcccagtctttcctgaggggaaggggaccgtcttgggcccttgcaccacagactccttttctgagcccctttccctgtcttatgctcacttatccacccgtcgcctgtcatccctctctcccctaaacaaaatctgtccctctctcctgggtttctgggttgcagatggtccattccacacactctatgcttctcaagatcccctctcgggcacacgttactgctcttccaccagttctgcccatcgggctgtgccttgcagccctgcatgcccccaccacctcgacgacaacaccttcgcctcgctcagcctctctgtagcttctgaccccctgaccctccatattcattgaccctcctgcctcatcttggtgccttcacatgcatcctcctgctgtctcccctgcctcctgctgcctcttctcagggtctttgcgggaccccctttgtggatcaccccctgaagctctggccacctcacagcagcactgtctcaggacctgtccaccacccctgattttctgtattagctgttcttgcattgctatagagaaatacctgaggctgtgtaatttatcaagaaaaggggtttctttggctcatggttctgcaggctgtaccagaagcgtggcgctggtgtcggtttggcttctggggaggcgttggaggctttactcatggtggaaggcgaagtgggagcaggtgtgagacatggcgaggccaggaggaagagagagagaatgggggtgggggaggtgccacgctccttaaacaaccagatccctatctcagagacagcaccgcgccacaagggacccgccctgtcccccaaacacctcccaccaggccccacttccaacactggggattaattacttttttttttttttgagacagggtcttactctgtcacccaagcaagagtgcagtggtgtgatcacagctcactgcaacctctgcctcctgggctcaggtgatcctcccatctcagcctccctagtagctgggactacagctacaccaccacacccagctaattttttgtgtgggtttttttgtttgtttgtttgtttgtttgtttgtttgtgtagagacagggtttttccatgttacccaggctggtctcgaattcctgggctccagtgatcctccctcctcagcctcccaaagtgctggaattataggcaagagccactgcacctggcttgattacatttcaacatgagatgtggacagggatgaatatccaaactatataattccacccctgccccctcacgcaaatctcatgtccttctcacattgcaaaatacaatcatgcctttccaacagtaccccaaagtctttttttttttagatggagtttcactcttgttgcccaggctggagtacaatggtgccatctcagctcactgtaacctccgcctcccaggttcaagccattctcctgcctcagcctcccaaatagctgggattacaggcgtccgccaccatgcccggctaattttttttttttttttttttgtatttttagtagagacgagttttcgccatgttggccaggctggtctcaaactcctgacctcaggtgatctgcccgcctcggcctctcaaagtgctgggattacaggcgtgagccaccacgcccacccccacagtcttaactcattacagcattttggtcacaaccatcgaacaagtctctaagaagttccaaactttccctcatcttactgtcttcttccatgccccccaaacgcttccaagctctgaccgttggggccctagatctcctcaaccagcatatccagcctcaggtccacaggtccaaaccccaccacacacatgcccttagctgttcacaagcaccttcgtgcttaccagaaccgagccagccagctgcccaccccttcccccacagggggccaggcccgggcctccccacctgggttctgtacagcgatggggtccacagctctctctccagctccttctgtgtcctcgccccagagccctgtactccagaggttgaagaacttgccgaagatcgtgaaattcataaaaggcagggccagaatgcaagcccggttctggacttgacatcaagtggccaccagagatgtcaccccagcttccccacctgcgtgttccagcctccagcagagaaggcagggtgaggcagccggtgggggataggggaccctcccgtggccggtgaggccctgtccttctctaagtacatctaactgaggcccctctctggtggaagcccgcacagccagtctcctggccttcgcttcctcccagcgtggagtgacagtttcaaagcacagctctggttgctgctgggatccagctgggctctgggacagtgtccagatcctgtcccctgcagcctccagttctctgtccacccccctctacccacagccttccctccagtctcaccgtctgccagcctctgctgccctgtcttacccagcctgttctctctgcctcaccagcagccatcccccaattctgctgcccgtgcaactggcctgtgctcctatcaccccaagccacctcttcagggatggcctcccccaaccactcagccctgcaccctcagatcccctcaggagctaacccagtgcccagagcatctgcagcagcgccaatggccaggcctccaggccagcttaacacatgggccttttccaggatagcgggccaccagcttggaactggggcagcctaggatagagggtttgcagccaggatgctcacacctgcacagaatgtcacctacatacacggcaggactgtgtgcccacccctgcagtagcagacacaggaacaagtgcacggggaccaggcccacgcaccccatcatctccctggtgcccacggatggtgctgggagctgcaagttgctgccaccccagggacctgaccaagaccacactggggtggtcacagactgggggcagataaaacaggcagtgcaaggaatcatctcagcagctttttatccacccctcttgccaggcgcacacctccagggaaaagggctcactctggccaggcaaaagtcacctctgcaaaggttctccatctcagccctgtctctctgtcccccaggccctcatccctgaggtggaatgtggcttccctgagccttgttggagcttaacgccctctttttatcccaggagtctgtccccatggtcccagcacggttcttggatgtgctcctgtttgtggccaaactgaagcatcccctcccttggtccaggaccttcacctctattaatgtgacccaaggccccattagctttctggtggtttcctctccctacatctcacaaccgctgtccacctcccatcctaagcatgagtggccggctctgccatcccatcccacaggccaggacccaaggactctgtactcaggccaggagggcatggtatttatcgtctctctggacctctcccctttggggtctccttaaagtccctgcaggtggcccagggccagccccaaccctgcccccgacagtcctccctccaaggccgggtcctgccttcaggtcctgcctcttccctcatcccctcctcacttccgcagataccaccttcctgccagggacccaggggctcagtgaatgtctgaaggaagaaatccatttaggggcccagtgcggtggctcacgcctgtaatcccagcacattgggaggttgaggcggacagatcacttgaggttgagaccaacctggacaacattgctaaaccccgtctctactaaaaatacaaaaattaactgggcacggtggcaggcgcctgtaatcccagctactcaggaggttgaggcaggaaaattgcttgaaccttggaggcggaggttgcagtgagccgagatggagccactgcactccagcctgggtgactgagtgagactctgtctcaataaaataaaataaaataaatccattcggggcctgaacgaggcgagactctggtgtgagcaagggcttagacagagctgggggtggatgccttgggtttggtcccaggtcgggaagcctccgttctttgactgtaaaatgtgaatcgtcttttctgactcatctataaggacttggtgtgcagtgggaacccaggagcatgtggaggtgaggctgggctgccccatcctggcccaggacactgagcccagccagggcaggtatgacagccggtcagcaggccgcgcagtcagggatgagtccacggaggaggccgcacataccatttccctggcactgcccacagcctgcagcctttgtgcatttctgaggccacagtgccccctggcggctgtgcagcctaccccaaaggacagcgtcctgggtctcaggcctcagtctccctctctgcggccccaacagctcaccctaaacaaggtttattgttaccatgttacatgtcaccatttgggaccagaaagggggatccagtggccctgagccgcacagtcaaccagaaacagggccaaacctcaccctcagggctgcctggctcctgggtcactgaagtcctgcctggcaatgcgtgcttgggtctgggtcccttccccgacatctctcaccctcctgcagggcaggaaagtcacagtttggatgctttgttataaagatgaccctggcacctggaggagggagagacagacagggctgtgggtcgggggactccttggggaccacgccaccccaaccactgcagctggagcctctgttgggggcgggaccaagcacctctgttgtcagcccagaggtggcacccctacgcgctccactgcacccccgcggctttctctgcctctcctacccccaggcttcccactggacattatcccagaacatcagctaggaagcaacctgagcctccttgcccctgcctgacaagcaaagtgaggcccagagagggaaaggggctggccagggccccccaaacagccgtgggcagagccacgttgcaccggtttctcctaatccctgacctgagctccttctcctacccaggggatttcatcaatccagagagtgcttggggccaggagtgcctctgacagtcagggagggcttcctggaggaggccctaggtctaatggggtcttctaggcagtggtgagttgggagggaatagccagcactctcacagcatccaggcagccctgcttccagaccgtgggttggagaggcagaaccaggggagggcaccaagggtcccaccaggctccctctgacggccatgtcttcctttggccacaggacgctgtgcagagctgcaagtccgtatcactgaggctgtggccacagccactgagcagagagagctgatcgcccgcctggagcaggacctgagcatcattcagtccatccagcggcccgatgccgaggtgagcccacccccctgccccatgcccatctcgctacctgcccaactgacttagcctctgcaaacactgacttcccagattagcctgtgtatcaggcagctggtgacaacccagaagggctgtcacctaaaaccattgggttctccctgcttactccatgaataccaccctgcctccgatttggggtgacaggccatggggcagaggccacagggcttcctagcggtagcacagaggcccgtctttccaggcactgccctgagagcagaggcagaggcaaggccaggaccatgcacccatctcccagctaaaggacctggagcccagagatcacagcaggctgggacataaacagcccagggagagcatctcctcgcccacctcccattctgtagagtccacagtgggactccgggagagaagtctgggctgtcccaggtcacgtggcaggctggttgcagggccagggaggcccaggtgtctgatgcatgtcaaagctgagtggctgcgaggagagctgcactgctgctgaactctggcctcaggagtgacttagggcccagccatctcttctttggtagctcatgtcacgtgtccaggtccgggccctcctgcagccagcctgcaccccggatggccccacccactccttgccacacccaccctgccatttgccttggccatgctgaaagggaatattccgtgcccattgtgcggaggcacctcctcatcgcttcctgtcacctgcagggtgccgctgagcaccgcctggagaagatcccagagcccatcaaagaggccactgccctattctacggtaaggagaggcctgacccatgggaggagggaggaggagggaagaggagacaggtgataccgcctaagaacacagatccccaaagagtagtcccttcctctaagaaggtcaggcccccacgcctgcaatgcagcagcaaccttcaaagggtcgggtaaggctaggtgtggtggcgcacacctatagtcccagctactttggaggccgaggtgggaggatcgcctgagcccaggaattggaggctgcagtgagctatgatggtgccactgcactccagcctgggcgacagaccgagaccctgtctctaaaaaacaaaaaggtgaatgagccctcaacctgcctttctggatcttagactgacaccccccaccttggggccctgacccttcagccctgccggtggcctgtgaaaggctggtgagtggtggtcagccaggcctcactgccaaagtgcagccggaggtccgtgcagtgaggggaaggcagcctccttgggtattgaggacagaaactgaggctgctggactgggatactgggggtgtgcccatgcctccccagttcccctcctgcccctttgcttccccaggggatataggcctagtctgacagctgcaagggtctcagattcaaggacagagtgactgggaggggagttctgggcctggccctctgacagcgcagacgggggtgctgggcccttccccagcgtgcgtattgtcaggtcagcccctgccatccattctcacgctccccggttcccctggctgtcccctccccttccccgacctgcccagcaccagggagtcagacaccatgtggcttctaccccatggcatttggcagaaatcccccagggctgggggacccaccccaaagggccgcctgctgggttccacctcctgccaccccccaagccaccctcctctacctgctaggacctgcagcaccagccagcggtgccctcccagagggccaggtggattcactgctttccatcatctccagccagagggagcgcttccgtgcccggaaccaggagcttgaggccgtgagtcacatccttctctccctgatgctccttgggcccaaggacacagttggggaacacacaggctttcaggagagagatgtggcacagaccgtaaacctcagggggaagagatttgttctgtgcagtcagggagggcttcctggaggaggtcatgccacactgggctttgaaagaagactcagatgctcacagtagaggagacacgggggccagtgagccagaagggagcatagatcattccaggtgaaacaagtcgccaggcaagtgccctcttgccaggctgggaggcatggccttcaatctgcagggaggggcaccaaggaaggatttaagccaggcagtggcactgcaagaatgcagggtgagccaggtgcggtggctcacacctgtaatcccaacactttgggaggctgaggcaagtggatcacttgaggttgggagtttgagaccagcctggccaacatggtgaaaccccgtctctactaaaaatacaaaaattagccgggcatggtggcgggcacctgtagtcccagctacttgggaggctgaggcaggaggatcgcttgaacctgggaggtagaggttgcagtgagctgatgagatcgtgccactgcactccagcctgtgtgacagagcaagactccatctcaaaaaaaaaaaaaaatccttcctttttaaggctgtataatattttattgtgcatatagaccacattttgtttatccattcacctattcatttacattgcctccaccttttggctgtggcgaataattctgctgtgaacatgggtgtataaatatctctccaagtctctgccttcaattcttttgggtatctacccagaagtggaattactagatcctatggtaattctatgtttaacgtttttagaggaagcgtcatactgccatatacttttttgtactgctcaagttttggttgtgtttgttttttgagacggagtcccgctctcttgcccaggctggagtgcagtggcacaatcctggctcactgcaacctccacctcctgggttcaagcgattcttctgcctcagcctcccggatagctgagattacaggcgtctgccatcacacccagctaatttttgtatttttagtagagacaggatttctccatattggccaggctggtctcgaactcctgacctcaggtgatctgcccacctcagcctcctaaagtgctgggattacaggcgtgagccaccgcgctggccactgcttgaattttgaatagtgtgaaagaaacacttattcaagcatttgaataaattgaaaactgagattccatttcacgttgcctttagattggcaaatattaaaaccacagcgtgtgattccatgaatacgaacattcggtataggcaaatccatagagacaaaaaagagactgccggttaccaggcagtaggggaggagggaatggggagtgactgctggcaggtttggggtttcttattggggtgattttaaatgttctggaattaggtagtggggatggttgcataacattgtgaatacaaatgaccgaactgtacactttgaaatgctgatgtttatgttatgggtattatatctcaataatagtttttaaaaggctaataccaatgacaaaaaaaagtatgaagaaatctgaccaggcatcgtggctcatgcctgtaatcccagcacattgggaggccgaagtgggaagattgcttgagcccaggagtttgagaccagcctgggcaacgcagtgagaccccgactctgcaaaaataaaaaagtagctgggcatggtggtgtgagcctatagtcccagctacctgggaggcagagatgggaggatcgcttgagtcgggaggctgaggctgcagtgagctctggtcatgccactttattctagcctgggtgatagagcaagaccctgtctctaaaatatatagacaggggccaggcgcagcagctcacgcctataatcccaacactttgggaggcagagatgggtggatcacctgagatcaggagttcgagaccagcctgaacaaaatggtaaaaccctgtctttactaaatacaaaaaaactagccaggcatggtggcacatgcctgtaatcccagctacttgggaggctgaggcaggagaatcgcttgaacccgggaggcagaggttgcagtgagccgagattgattgcgtcgttgcactccagcctgggcaacaagagcgaaactccatatcaaaaaaataataaaaataaaaataaaaaataaaataaaatatatagacagggtcttgctctgtcatatattaaggttgatgcaaatgtaatcatggtgtttgccattacttttaagggcaaaaaccacgattacatttgcaccaacgtgatacatatgaagaaacctgacccaagatccctgacttctgcctgtggtggggccacagtgggggaaggggcagctttacagagtcaggcaggtcaaggagaaggctgtgggcacagaaggggctccaggtagacggagcagcacctgtgccagcacggaggcctctcccccacccctttccttgcccctccccccccaggagaaccgcctggcccagcacaccctccaggccctgcagagtgagctggacagcctgcgcgccgacaacatcaagctctttgagaagatcaagttcctgcagagctaccctggccgggtgagggccctcccctggcctcagctccaggtggaccaggcagggagagaggccgatcagggctctggagatgggagggtcggggaccaagacctgctgggcagcactgggccccagagacccctgaggccttccgacatctccccacccacccacctgcctgctagctgccctccctaagccggcagaagctcacagagtggagcccctgtccagattcattcataaaaactggccagaaggaccaggcacggtggctcatgcctgtcatcccaccactgtgggaggccgaggcaggagaattgcctgagctcagaagttcgagaccagcctggccaatatggtgaaaccccgtctctactaaaaatacaaaaaaagtatccgggcatggtggtgcacacctgtagtcccagctactcaggaggctgaggcaggagaatcgctggaacccaggaggcggaggtttcagtgagccaagatcacaccactgcactccagcctgggcaacaagagcgaaactccgtctcaaaaataaaataaaataaaaataaataaaataaaattaaaataaaataaaataaaataaaataaaataaaataaaaaaataaaatataaaataaaataaaatataaaataaaataaataaaataaaataataaaatagtaaagtaaaataaaataataataaataaaataaaataaaatagaaaagaaaatactagccagaagggccaggcacagtggctcatgcctgtaatcccagcaccgtgagaggccgaggcgggtggagtttgagaccagcctggccgacatagtgaaaccctatctctactgaaaatacaaaaattagccaggcatcgtggcacgtgcctgtagtcccagctactcaggaggctgaggtgggaggatcacttgagcccaggaggtacaggctgcagtgagctgagatccagccactacactccagcccaggtgacagagcaagaccctgcctccaaaaaataaaaataaataggctgggcatggtggctcaggcctgtaatcccagcggtttgggaggctgaggcgggcggatcatttgaggtcaggagttccagaccagcctggccaacatagtgaaaccccgtctctactaaaaatataaaaattggctgggcgtggtatcatgcacctgtaatcccagctactcaggcggctaaggcaggagaatcgcttgaacctgagaggtggaggttgcagtgagccgaggtcacaccattgcgctccagcctgggcgacagagcgaaactctgtctcaaataaataaataagcaataataaaaaatgtaaacagaatttggtccacactccaaaaagcaaccaagagagtggatcagaaactcacttgccgagtttttctgggctagggaggcctgtgcgtggcttctctcagcccccaggcctcccaggggccaccccgtgccaggaaaccctttctatgagtgagagaagagcgtggggcatagtggggcagggattcacctctccctcttcctttggggcccagcagcccccagccctgtccccacccatcagagccgctccttggccaccagagggcactcagactctgcaaaccagcctggctctgggtggccagctggggggcgtctcctctcccagctgcctgcctgctcgcatgaccaccccacactcccagcaaacccaccttcctgcagctgcgcccggccctgcctgggcctcagttccccatctgtgcccggaggcactgtggccctgaccccatgggtaactccatgcccctgtggcaggaggcaccagccacattcacattgtcaccccagcaccctctcctcccgcctctgagatctagggctccctcccccacttcccttttttgcagatgaggaaactgaggctcccctgggctcctgcccttcccgctgggccccaaggcactgactggttctcttcccctcctgtctgtgcagggcagcggcagtgatgacacggagctgcggtactcgtcccagtacgaggagcgcctggaccccttctcctccttcagcaagcgggttcgtgagcccagcctgggcaggggaggggaggggcatcagcccagggaagcccaggggtccccccatcacttggcccccatccctgagcactcggccttccctggctcccctccacctgccctcgtctgggtgctctcggccagccttgccacgccagccctgcacaccctggcccctcaggccaggagcccccccaagacagcctccccaccgcttcagtgcaatgtaggcccagggcccattcaggaacacctgccgaggactacccgagggtgtgtggcagtgaccgggttaacctggagtgcatttgcgggacaggcagacaaggaaaaaccagttacagctcccagaatcgggcgatccattgtggggaccccaccccacaactcccctcccccacccagactgcagaagttctgcccgtggagtactttcccatgggcagaatggacggctgcagaggcggggaggggctctcacagatgtcaggggagtccagaatgtcacactgagtagactgtgcacccagggaagcccctggcagcaccctggcagccccctgggggtctgcaagaacagcgggcagggtgtcctgtggctggccaggccctgctctctgccacaagccagggcctgtgaggtcctttggggtcctttcctgactgtccctccctgtgcaggagcggcagaggaagtacctgagcttgagtccctgggacaaggccaccctcagcatggtgagtccctgcccctacccaccccctccctggacaggcctgagcctctgtctccaggcacctcttcacctgccctgcagcccaggctggaggagccgccagccctgccaagagtggctgtgtgatctgggacagggtctctccccttcccgggcagatcctctgagagcatggttcacagcatggttctgaactgggctgtagagggggcattcctcagaattcctgcagcctagagtcagacatggtggctcacacctgtcatcccagcactttgggaggtgggaggattgcttgagcccaggagttcgagaccagcctgggcaacacagtaagatcctgtctctacaaaaaataaaattagccaggcgcagtggtgtgcacctgtagtcccagctactcaggaggctgacggaggaggatcacttgagcctaggaagtcaatgctacagtgagctgtgaccactacattccagcctgggcaaccttgtctaaaaaaacgtttttaaagaattccggtggccgggcacagcagctcacgcctgtaatctcagcactttgggaggccaagttgggcggatcacctgaggtctggagttcgagaccagcctggccaacatagtgaaaccctatctctagtaaaaatacaaaaattagctgggcgtggtgacgcacacctgtaatcccagctactcaggaggctgaggcaggagaatcacttgaacccaggaggtggaggttgcagtgagccaagatcacaccactgcactccagcctgggcgacagagggagactctgtctcaaaaaaaaaagaattccagcagcccatgtccctggcccataatgatggaataggggccccagcttcctgtcccttccctccccttgccaccctagggccctttctgtgaagcccaggcagccctgcaggggtgggtgaggccggccccatccccactcaccccctccttgctcccaggggcgtctggttctctccaacaagatggcgcgcaccatcggcttcttctacacactgttcctgcactgcctggtcttcctggtgagtgtgcacacgggcgggccagaggcacattcaccatccccagccctgacctccagggcagcaggggcctgttacggtggcctggcccctgggcctaccccaagctgcatctctagcttgcgaccatgcctctccccttcgagagccttggcccaccccagggacgagaaggacccaccccattgggacctctggccagggcaccagccgggccgctccgtgaaagaggcctggctgatcacatctgggactggtcctggacgggcttcataggaagaagggatggagtgggaagggagcaggtctaatgaactccaccaagggacagtcacgaagactgcacagagaaggggcgtcttgaactaacctccccagctgtggaggtggcgttctagttagcggataagggcctccatgtctgccaagttgggggagaagaggggtggaaggctgtgtctctggaaggatccagccttggggtctcctgtccccagcacagtcaagatggcccctacagagctaacctgggctcaagttctgaccccagggtccagcggctcctggcccttccaagggttggcccacagtattagaggaggtgcctccgtgtctgggcccatctgatcatctgcagaagcagtgggtgcaggaacatgtctaagacccacccgccccggagtctggggctcgagaacctttatgttccaggccaggcccaggggccatgggtgggctgcaggggtggccttgaggcgaacgggcagctcaccgtgtctccacctggccaggtgctctacaagctggcatggagcgagagcatggagagggactgtgccaccttctgcgccaagaagtgaggacccccacttgggccccccctcagccccacagcgagctcccagcacccccgcaacacccccgagttcctgcctcatgtcccccactccttagccctccatcacagccccccattctggccctccccctacccctactcccggtatccactacctcctagccccaccccatcacatggtacacaccccccttccccaacacacacactcggcctcagcaaagcttcccgtgtcccccaggttcgctgaccacctgcacaagttccacgagaatgacaacggggctgcggctggtgacttgtggcagtgataccccggggcctcccccgtgacagtgacggctgcgcctccaccccgactgctcagtgcatctaatcacttagactcccctgaagaatcccccatggaaactgcccttatccgctgtccagcagctgccagaggccccaggtcacctcgggtccccttgaaagaatgtctcggtcacatcaggcccgctaggtccagagagcgagcccccaatgcccggccaggctaagccgcagagaccctctcagcccccacctcaggttagggctctgcccgcagcctgacctctagccctggtggcagaggtccctcagctgcgaggctaattgggtgaccaccgattccagctgcggttaatccagcttgggcctgtctgcactgcgatcctcttgggctctcctaggatccccccatgccccgtaagaggtggaagacgcttccttccaggacagcaggctttgagtccagcacccccagcctgcctttgccaccagccccaccctgcagagtatatgaggcttgacagagtctgccccctcccccactgcaccccaagagagagagccccagccagcggaacagtttctattaccccctccctgcccccagacccatgtgatttctgctttcttctttagcaagatattctggtttctagataaggaagagtctctaatgagcccccgagccccagtctcttcagactcatggattggtctgaggggtctgaacgtctcctagccaatcagaactggctgtggaccaccctagcacggccacctctcagggccactggcaggccttcctgagttagatttgtagttgcatatttagctttgcacatttgaaataaaccacggttgcagccaccctggtgccctgtgctctgggacgctggagggactggaggctggtggggatgcctgcggtgccacccctgggagctggggctggcctcacagctgggcacacagaacattcctccccctcttctcatctccaggaattccatgagtacattcagagctctgctgaaacccagatccagtgtccgagtgcttttgagaggacaagtagcaccatcaaaaagggaaacccattcctttattcaaaaaccacccggggccaggcgcggtgggtcacacctgtaatcccagcgctttgggaggccgaggcaggtggatcacttgaggtcaggagttcgtgaccagcctggccaacatggtgaaaccccgtctctaccaaaaatacaaaaattagctgggcatggtggcgcatgcctgtaatcccagccactcaggagggtgaggcaggagaatcgtttgaacccgggaggcggaggttgcagtgagctgagatcgtgccagtgcactccagcctgggaaacagagtgagactccatctcaaaaaaaaaaaaaaaccacctgtcgggctgtggttgggtgtatgacgtgtcttggtccacgtcagttcctggggaatctctgcttccctttctgtgctcccctttcccatgggcccccgcctgccaggggctgcaaagcccgtgcccatcaatccccctgagcaccagcctcgcatgggaaccccccgagacacaggttctgggccacctcacctccagcccagcctcagatagaggagcgcattctctgggtctggagtgggtgcattaactcattgtccagctgtcacaagactggctgcaaacccaggtcccccactgcagcccaccaggccagggtcccctgtgctacctctgtctccattttagttctgaacagtctaaagcatgtgtatccaggggcctttctttggggtccccgtcccagcacccctcatctcccccatgaggacttcttccaagcccctcaagcctcctgccctcagggacccaggatggacctttcctccctgaccttcattcctatccccagcgaggcgacagctgctcttggccaaccacgccccctccacccccacagccacttccacatctccatcagttcctccttgtgggtccgaggcgctctgccgccggcccctcctcacttcttcctccctggggatggatccaagctattgtcctgcccatggcttcccatctcaggacgctctctggccgctatcatcccagcagtggagttcagcccactactctgaaccaggttagtccaccgcgggtcaggctctcccctctcccgggagggtggagaccacaaccaggccatgtatggagcttccctttctcccactctcgggcaccccctcctcccccttcccggcctcattcataggtgtcctggttcccaaccaggcgtgcaggcctgtgtgcagctccgatcgagggctggcccactgccgaagct

SEQ ID NO: 138 - DNA, 37379 bp, Homo sapiens
  source 1..37379: mol_type = genomic DNA
tcgatctcaggctgtaacgtttaaccctaggctgacttccccaaccgccctccccctctccctcccctgcttgggtctggggactgcgttttcttcgcctcgcagaggaaggtcggccttgcacaaatccgcccccacgaatcccaaagaattggagaaaacttccactttgggattatatgcagttgggattatatgagcccggggcttgcaccatgggtacgtgaggtgaagacatctgcagcagcaggattaattagcctaagatgggcatatggaggccactgatggagtgaaagcgggatatgcgggcccaactctgtccccactgggcgcctactctggcaaggctgagttttccttctgtctttcaatcagtacctattgagcgctgctgttccaagcattgtttcgggttttgagtgcgtaggccatggtctcagggcaccaaatgtacgtagtcgttttagccccgggactcaagagttgaggctgatgcctgcctgagagataaaatatcctttctcggatcagtttcctcacctgagaaatgggaacgggaatctccgccccttttctcccggggccctagtgcccactgaatccattaaggagctcttggaagggtggggtcttggaacacgcgtctacctcccaggaccctcgactaggaatctctggcccgccgcgcacctgagctggggggcgcggccaaattctccctcccggtcctcgaagcttctggccccgctctagagggggcagaaagatagcagatttccccggaggtgcgtctctaaacccagaccgcctcaccaaagcggggaggtcgtccttttttttttttttttgtaaagttgcgggaaataggcgaagacggggcgcgcaagggagctgagcctgggtggaccgcgtcagggcgcggggagctcgaggcgcagcggctgcagctccggcctcagagcccgcggcgtccaagtggcccgagctgcgctgggagggaggcggcgggaggagggaggggagccgaggtggagggggttggggggaggagggagcggcgagtccggtccgggttttgccggcagcccccgggcagcgttcatagctcctgcccgggcgggcgcgcggcggcggcggcagaggcggctgagcctgagcggggatgtagaggcggcggcagcagaggcggcactggcggcaagagcagacgcccgagccgagcgagaagagcggcagagccttatcccctgaagccgggccccgcgtcccagccctgcccagcccgcgcccagccatgcgcgccgcctgctgagtccgggcgccgcacgctgagccctccgcccgcgagccgcgctcagctcgggggtgattagttgctttttgttgttttttaatttgggccgcggggagggggaggaggggcaggtgctgcaggctcccccccctccccgcctcgggccagccgcggcggcgcgactcgggctccggacccgggcactgctggcggctggagcggagcgcaccgcggcggtggtgcccagagcggagcgcagctccctgccccgcccctccccctcggcctcgcggcgacggcggcggtggcggcttggacgactcggagagccggtaggtgtcgggccacggccctccctcgaccccccccggaggccggccccctccccttccccgcctacctccctctcctcccccggggttcggtgcgcggccggggccggagttcgctgcaagtcggcggaaagtttggctgcgcgggttcccccgaagttcaggtgcggagagccggggacggggaaggaggggtccgtatttgggaggggcggggggcgcccgcaccgtaagccgcggagccccggagcctgggagacctagcgccggtgatcgcttggtggccgctgctatacccaagcctccctaagccgcagtatgctcggtcgcagatcactgagttcagacaaaaagaggggttttagggtctgggacggcggcttgggcgccgtggagtggggctgggacgctccttgcggggtgccgcccccctcccccccactactccagttcgcgggcgctggggcagcgggcgcccggggtcctcacctcttggcgttgggcgggcgctcagcctgcgggggcggctgcttgtagatctctggcgcgcactccccccatcagaccccgctcgcagccctgtgttgaggggcgacgttaactgctctgggcgccctcgaccacgcgtggctgagcctcccccaccacttggaagaagcggcggctacttctgcatttttcctccggctcctcgcccccgctgcccgcggggtgcccggcgggctgatgaagtttgaccttttttttccatcaaagtatctcccccaccaccacggtgccccgcggcccctccctccctcctttcccagccttggggagtcttttgagctgtctcccgagccccgcgtgggccacgcagcgtgcagagcctgggagggagaatgggggtgttcctctagctgcggaactgtggggggcgtacgtccccggcgcctgccacgctgcactggccccaaatttacccatgaagttcggcccgacccccctccccttcgcttccccggagcggagtgaggggctgaaccgccgcgagaggaatgtgttaattttctggctgggggaagttgtcctcgcccggaatgggctgctttccggcggggagcgcggggtgcgcctggctttgtttatttgtaggatcgacggaaagcgagtgaccccggtttttaaatggggggccaccttcgggacctgtcagaagagctgaaacgcccaaagtgggagcaagatctctttttgttcttttttcccccccgggaatctgaaggggtgcgcggagttgggctggtgcctcgggctgcaaggaagcaccagtaaatttggggggttctgtagtgactcattcggaaagacccgctccctgaagtctcccgcgacgggggtctgaaggtttggcaaccgcgccctcctttgccccctggactttgggtggtctgagagtcgcgccttcggatggggggggagctaagggggtgaccagcggaccagactcctgacccccacctttcctcgcgcggcgggcgctgtttggagcccttggatttgtggtgggccctgtcccccccacccccgcattttctttggaagcgttggggagggggcgtgtgtgagatcgctcggccctcgcccccgccggagccgccccagggccgccggcaaacagagtccctttcaagttttccgctggggccgcctggcgggggctgcgagcgcggtcgctgcggacttgtttggagcgcgatttgaacgcccggctccacctcagctgccccaggccgcggggtggggggcgtctgtcctttgcagttgggagtatttaaattagacgtcttgggggacctactggcctaagcttcacctgatccccctcctgaaagatgcccgtgccttggtttccaaccgccactagaaaaccgggaactgagaccgaagccccctctaaacccctttctgagagccgtgcggggaaactcaggccggcgggctacctacccgtaactgcgtattgttgatttagcagtttccctagatgagagtcaggctggagcttgggggggtggggagtggcccgctctgcagctgtcacccccctcccagaacggaaattgtcctctccttggggaggagggagagggggtgatggtttgatttttgccctgggaagagatgggaacagctgaaggagattggcctccgagttcccagccagcccccggaacttgggtagaacccccctacccctcatcctcgcagtagctgggtctctcccagggacgcccctagtcagccttggcctccctctccatgccacctccctttccaaggtgagcctctgcagaagacagacccttggctggctggctgtcgggttggtgccttatttatgtgtgtatctggtcctggccgttttccccgctcagcaggtgaccctggccagggcctcctatctctcccgcgacagagcctgttgacttacccgagggccagtggcctcgtctttatcacgtgaggcctggaatgtccacccagctgggctaggctgggctgggctgggctggggtgggtgggggaaggggaggggaggattctgcatccagggcaccggccagcacaggcccatgttccatgggttcccactgtgaccctcaactcttgctgcccctttcctgctctgcctgcctcctactcatttggcacatgtgaaactgagacccataggagtgtgggggcaggcttgtatctgggtgaagaaacaagtccaggggaatgaaataccctgccttcttcaggactgactgcaccttgttgtttatgggaggatggagtggagggagtcttgctaggagggagagagggatgtgggctgggctgactttccaggttgcaggatagggtggaggaatgagggaatacgggtgagccagacccaagcctgggttcctagagcccctgtctggtggcttgatcatttagtccgaattaacaagcatgatgctctggggcatgccctaattgaacaagaatgggggggttcacacattgttattacgttactattgcccactctttatatgttattcatttgttggcccaatatgtttgtattgagcacctactgtgtatcaaaccccacccttctggtggtacacaaatgaatcactgctccagctctggaggcaggcccaggatagaagctccgccccgtttccccgccccctggggccctgattggggctttccctcttttcttttttctggggctctccctctcttacccccaccacctggtcccatcctagccgccggcgcgcgcgcgcgcgcgcgcgcgcgtgtgtgtgtgtgtgtgtgtgtgtggctgtgtatgtgtgtgtgaagtgtccttgattaagtgtattaatagttaaactctcactcatagctggaactcaccagaccacaaaaagcctcccccgttactcacgcgctactgcccaacaagaatatcccactaaagtttttttctgctttctcttacttccccctcacctccccccaacgctgagcccacccttcctggattcgagcaatgagaaaggactgccccctaaagacccaggaatctccaaccctccacctgccccctaaagccagaggcagtgtcagctgacagagatgaggctgtgtgggcactagtctgttgttctgggatgtgggaatctgggtgatgtgtgcttatgactcaggacatgtgtgtctctaagtagtgtatctatatctgtgaatctctgtgttgaatgtctgtctcagggtgtgggagtctgaacatacatggatttatgaatcagggcatgtatatttgtcctgatctagaagtgtgtggatctgtagtgtatgtgtacatgtgtgtttgtgaatctgagattgtatttctgaagattggctatgtccctgtgaatctgggaatgaatatattctgtgagctgtgtgtgcttggaattttggagagtttggatttgtgatttgtgtgtatctgtgtgctttgtatatgcttataaatctgggggatctgactctgagtagagtgtgtctgaattgtgaatgtgggagtgggcctgtctgtgctgtatggacagtggtttctctctgtctgtggtggcggctggctatgttttcctttctctttctgtatctccgtcttactgaatctccccctctggttgtttgaggccctgaatgtgtgtgtagcatggagtgtgtgtgtgtagaactgaacctctcacacccagtccttccccctgcaacccctacaccccttccctccccagcagtaactgggcagcctccccgtctgcctgcctgctgggagttttggaagccgcagagggagacaggctggggctggggtgacagcgtgtatccacggcaatggtagcatgtgattacgggaataaaaggattttaaggtcatgggtgggttttctggagggagggggttgtgcccccacaacccaccatttggtggagccagtggcagcaaagggccagcctgtgtgtctccatgctgggaagcctgcccctatgcaggtgaatgtggatatgtggggcttacctgggagtgtgagcacatgcttgcacatgtatgaacggagcctgtgagagcatgtgtgtctggctgccagatccccagatgagagtccataggcttgttccctgggggaggattcccaggaaaacttcttgcttctgggtattacatggagctggaaccccacagtcctctgtatgttgagaagcagtctggtcccaacctttccctgtacccatactcccaaccccaagtctagtgtctctggccagagactgactgggccaagtcacctgggccaggccacatcttggggtgtcagtgccctggccccgctccagcccctgtaattgcattctgccgcctaatcccccgccagctcaattagatcgcaaattcttcttcatttcctgcctctgatgctggcctccctctgggctcacagggcctaggagggagggaggggatcctgccccgccttccacagcactaggggctctagagaggtgattagttccaggcacactggccccagagcacaggttagaaccctggggaccaacaagacagggctccactggccctttttgggtcagcctcagtatcctcacactagggcagggctggtgttacctggtatgggggctctgggtagaccaagcagatcactctagccaggaccctagcttgtaccctcacctggggctcctacaggctctgcccctctcccatcctcaaagcagttgccatctccccaaccccccacggcagttgtgaccttgtttttgaccttttctgggtgtcccttgtcagagccaattgaaccactgagctccactgctaccggctcctcctaacctccacccagacaagtgtgtatgagcagtggctctagagtccatcagatctgactccaaatcctggacatgtcactgcctagctggatgtgtgacatttgggccagttgtgttatctctacaaacctcagtttcctaatctctgaaattggacggtaagagaatgcctgcctcacaaggtcattttcagatggacacagatggttgcatagtgcctggcagggagaggtgctcacctacaatctgtattcagtaaacactggcttttatagagacaaggaatgcatgtcccccgtgaatcctaagaaaataacatgtggctcacacctcgcacttctgtctccattcagctgattaccaggtgtgtgaccgtgggtgcatcactttgtctgactttctcttcctcatctgtaaaatgggactgataataggacagaccccatggggcacatggtagccttctctgagatgatgtgtgcagatgcttggcctcagtatgttttcaaggtgttacttgccttctttctttcctcaccccaagcctagggtggggtagagctggtgaagacacaggctcagggacaaggggactgacccaggtggtgaagctagtaatggggccaggctggggtagcgtgggagggctggggggtgacctgctggctcagctgagctgtgaggcccagccgtccctccccacaggtctctgtggaaagtggtggcttggctgatttttcctgggaaggagaagctggatgtctcccgctccttccccaggaggtgccgtggcagcggctgtgttgacaggcctcctggctttcttgatagggtggctggcagctctggaaggccggctgtacccagatcagccctagggaagagggaactgcagaggtctccctgccatcactaatccccgaggcccatcccaccctcagcctgtccctccatcgcaggaggagagctggggagactggctgtgatggaggtggtggagagacaggccagaggtggggcagccctccgcctcagggttccccattgctccctggctagtctcctgcttcctatgacctttgtcactcactggcctagctcttcaatatttcatggcccttcaagccggccccctaccccagcccacacagccccctttgtctctgcctgccaccccccgccgcccccctgggcatccctgccgctgaattactgacccagaggctgcctctgccttctcctaactgtcccccactgtgcctgcccctgacactttccctatccctcctgacctacctccccacacctctccttgtgacacccttcatctcttcgggattctctccccttcgctgacatctctgaccatctccctgcccttttcctccatttccctcttttgttggcctcctccttcccagtggaacagaaaccgcggcaactggtccgcctgcctgtccaccccccaaccactgtccaccccttcctgccccctcccccaccagctgtgccggccggccgtgagagctggttttatttatttttctgtttgtttgggaagagggcagtggcggctctgggccctggctgctgcgctctgcttagagcagcgggcaggcgggcctcactggcctcccaggaatgtggctgggacgccccagctatatttactcccctccagctgccggccccagcagggcagagccaggcctgcctggtggcccccggggagccctgtacccgccctcctctgtctggcagaccctacatcgcccttgggcccagcactccctcccttgcctgtgaccttttctgacctcctcagacgtgcccagcctgccagcaggaacacttgtgtgccatgccagtacgggcgtaatgttcgggcactgggggcctgggttcctgtggggcaacccctagcggcccctacacacccaagtaggggcctaggctgggcctgtaatccgatggccagaactatgcaaagcatctttccaggcctttctctgtgggcctggcccctgctcttgccacagtccccttggctctgctgtgatcactggcaggggtggtgtcaggtgggggcctcagtgggcttgagtggctgtgctcctggcatcactggatccccaggtctctcacacaggcacacatatgtacgtgtaacacacctaagtgcttacatacacacacatgtgtgcagaaagacaccctcacccatgaaaacatgctggcttataccttccttgcaggcagggccgtgcctcctgtcattgatcccctcattcatcagatgcttattggggctgcttattgggcctgctccttgccagccttgcaatgggatatggcagtgattacttcttgtacccccagtgcctggcaccaaataagtgtttgaagaactttagctgctgctgtaatcagttgcggcccccgttaactgctattttgtttttgtttttgtttttgtttttttgagatggagtctcactctgtcacccaggctggagtgcaatggcgccatcttgactcactgcaacccccacctcctgggttcaagcagttctcctgcctcagcctcccgagtagctgggattacaggtgtgcgccaccatgcctggctaatttttgtatttttagtagacatggggtttctccatgttggccaggctggtctcgaactcctgacctcaagtgattcacctgcctcggcctcccgaagtgctgggattacaggcgtgagccaccacccccggccaactgctattgttgtaatagattgtaacaaagccagtggtaatgggtagcccaacgaaagtcctctctgtggcaggcaccatgttaacagctttctgactttcactttttttcatccccacagtagcctcaggtgacatgggcccatacctgggacagatgcatgttgttagcatccccatatacagataaggaaactgaggccttgggagtttgtggcttgccactgcctagtgggatggagtcctggcagagcccttgacaggctgttggcctctgtgtgctgtttcctgcaccttccacactatctggcacacagaagggactccttaaatgcttgctgggcacaggccttgctctttcctctttgaggcccccataacccttggcaatgggctggatgtgttgggagatgggctgataggctagttgggcagacaaaagtgaatgaatgaatgactggatgactggtggtgaggataagtactgtcaggggacactggggtagggggttgctggtgaacaggctggcaggtggagacctactggccctgtggaggattctgggaagcaaggtaggggcaaggcggagagatgtggccagagagcaataggctgctaagccaagccagtggggcgggtcctatcttctttgaggaccacaatttttccatctgtcagatgggcttgggagcctttgtcctggctggctgccggctggcctgggctgggactggcctgggaggtgaggggactgtggcgggaaggaggaagcagtgggtggtgaagacaggaagataaagcgtggagcttggcttggaacctgagaagcagagaccagccctgacctgacgcccgccctccctccctcctagccgcaggatggggtgcaggcatgcaaaccccccaccacccactctcactctggtgcgggctgacttcctgacatctgtggcattagtggctgtgtgtgccaggaggaggtggcctgtcccctaggactagaccagcttctctccaggccaggggctcccgacagcttcatgccagttcctgttgactctgatgggagagacccagcccctctcctgcctgacccacctcccccagaactagatgggaaattagttaactgggctcatagcagtaggcagaagtggacctggccccctttcttcctggggcggtcagatcttggtggcctagaatttcttagtcatgggagtctagaatcatagatagaatgcttggaatggaggcatttttcaagtcaggattctcgttgggattctggaatcacagaaccatggattttgctgctagaaggaagtgtaaatggtcatgtttcagtctccttgtttgatgctaggggacactgaagctctaggggtcaggctgccctgaggtcacagggcctcttgtcctcaggtgacatgagcccatacctgggacagaaatacctgttctgcccctagccagcccctctctggagctctagccggtgtggagagtgggctgtgggcccagtcaggcagtggggggatgcggctggcccacaggcacaggaggggtcctcttggcggtgcccgcccgcccgctgcccacgcttcccgaggcaccagcgtgaggaggaaatgcaggctgttgcttccagcaacagccggcagggccgggcggcttcccagctccccctctgactcatggccgcctgcagctccccctcccttggggtcctcagcagccccatctgtgcaatggggagaggaggcttttttcaaggtctaacatcaccctgacaataccttgggattcttttcaagaccactgttgaactgtaggagagttaggagtgtcatctagagcagcctagctgggcgtttgaacccagaacactgagagattctgtttggagtcatcctaatgcctccagaagcctgggagggctcaattgactcctgaggcagaaagtgtggtgggaggcaaaggaatagtgaagggacctgcagtcaacccctttcaggaagagcacagtgggggatgcgtggctctctgggctctccctgaccttggtttgcccatctgcagaatggaggtggttacccatgaggtcattcattcagtgtctgtgctgtgcctggatgctggggctagtggcagatcggctgggaggggaggattcctctgctgcagacgggtaggggtgtgacttggtgactcccggggaaggactgaggtggggggaggtaaggagccggccagtgaggcgcggtgtccagcggaaaatcccagctgttgtcaggaagtgtttcctccactggtctcctgggagggagacaggctagcaggaaggagggcaatgggggcaaataaggcccccagccagtccaagtggagacatcccaagcctggcagctgggcgggtgtgccccgcacactgcaggagggctggaatgcaccccccatgctctgaggctgggcctatgctggggggctgggactgccaagaggggctgggccctcatccagatttcaaagccttccccaggggccttgtggtgccctccaccctgtcctgagctgccgctgcgggggtggcagatgctgtttcatcggtcgaggcaagtgggagccctccggaaggtcctcctgggaggttccggggggcagcaggggtgtccgggggcagtgggggtgtcggcagctgctgccccgcctgggctggctctcagtggcctcccaggtcctttaggccccggggcctggaggtggtgcttctgcattgaggctggtccctcctgcccttgctttctcccactgcccaccgagcttcttggttggctctggccccctccatccctggctgtgtctgcaaagccccccgggaaggcagggaggaggcgcagcaggctcagaacagcgggtgcccgcgcagccaagtatttgctcgagctgtcagagacagacaggcatgtggggaatttggtgcgtgtggggctgggggaagcagccgggtgggcaggcaggcaggaggagggaagctggggctgcctcccagcctgtggaaccctgcagagaccacctctccccagtcctagaggcaagctgcatccaggcaccttcctcctgcctgtgccagtgcagtgaggggagcgggatgatcctgtggggtctgataatagctctgacacggggaagggggtgccttgtcgagggcctgcaggctcaaagaggctctggtggagtgtggagccaggcaggaatccgggttgtgcccgactgtggcctccaggaaatagcagctgtcatgctcccgcccctccaccccaagcctggcacaacttgtttcctggccaggatccggccagggcagattggaggagcctggtattgcccggcctgggcaaggaacaggcaggatgcaggggccatgtttataagcctaaaggcgtttggggtgctctggggaggggacctcagcccttatctcctatgcgaagaccccaacccagtcacctttgtggtctacactccaaaagcacccattaggtagggtagggcccagagctgagtaatgcttggtttttcgtagcttgagagcccagagagggggatacgctgccccaaggtcacacagtgggctcctcagccttcccctctaccctcatgtgggtggggccactgggaattggtgaacatgggggggtttgctggggtggggggcctatatttagtcagtcctgcagagccagggcgcctctgggagcagctgctggggttggggggagtacacagacagaggcctagagctgcatttagtctggacagaaatatcctccccccacccacccacccactggctgggaggccaggctgcgggcctgtcccctgaggggcagcttgcctgggcctggtggccggcgggacaggcaagatgacccgataggcttttcccagctcaggtttcgatgaaacaggaaccccggagctgcagcctgggccgagggggccagggcagccggagtctgggggaccaggacagcctcccccacctccgccctcatgctcttccccatgctgcagcctccccttttcagaggcctggggaagcagcaggttatttatcaagccagcctccccgccgcggctgcccgcgccgcccccccacctcttgcgctgtcggccatcagcccagcagagcagggtgagctgggcgggcgggcggcaggattagctcaggagacgtgagtcaccccatccccagcagccccgagaggccctgcggcctggcagttagagtgcacactcacgcaccccacacgcggcacacccaggcacacacttaggacagacacagtcacttgcagcacacgtagttccacacgactcagcacacccagccgacacgcgtggtacagactcggtcacatgcaccatgcacacacagctcccatgtggtgctccagaagcacactcacggttccagccacagcccagcctctggcacacacacccactggcacgtacctaggcgaatgcacatacacaggcacacataggcgtgcacacataggccactctcaccccattggccccacacactggggcctgatcattctcaggccatagcttacccctagatgatgccatagagtgggccagggcactggcacacacaggcgcagctgctgtggtcagggctctgttcccctagacgccccgtgtttaggcttacacggaagaggcccggccttcagccatgttgtgtccaccgggttctgcaaggtgtgggtggggaagtggagatggttttttcccatagccaacctggctctgccctctctggggaggaggtccaagtatcaggcatgagagtgttaaacccactgccctctagtacggggcctctggcccaggcagagtgggttgggtacatgggggagagatacaggggagctgggaaaaggaaaggctggagaaggagtgccagggaaagtcgatttccccaggaccactaagtggccagctggttccctgacctggggcatggggtccttgggaggtgacagggtgtgccagagatggggggaagaatgagacctctgatcaaatgggcccaggagtctttctgcctaccttccctgcttaccacacacctgcttctccctgtccccttagttgccaaggccctcattatccagtgcccccacttagattttggccatgtccctggttcttagtctacagccctgcaaaatgggtacagagctggcttatgtataaggaagtcctggggtgctgagagctgagggtatgccctcagggagcctttttaagcctctgcccgcctttggggttggggcctgccttccttgcactgggcagaaataaggatataccccttttccatatgctgccaaaaaaaaagccgtttttcagatgagagaagtgagtctgatgggaatggcttcatggtcatgaagggctttggatgcaatctcctaacacccagactaccggtcattctgggcctacagtactgagacagcctagcagtggtcaaagggcatgtggctataaggactcaggcccagttgggctccctcctcctggccacacagttctccataaacgactggaccgtggttgaggaggagagagggacccaagcatcctgagggacacaaacagcagtggccagtcaggaaactggatgcccgtgccgcggactctggagttggacaggcctgggctccacacctggcttggtcgctgcctgctatgtaatcatgggccagtctgctcacctctctgacctcatgtttgtcacctgtgagatcggtatgactctcatctctgtctcaaaaccgcaggacctgaagtagatggtggggtgtgttgtcatcagttctcattatgtcacctggatctccaggcgagcatgcccctccacctgctccactagacctggcatttttctgggggtggcatcccacaacaagggctccttaattagaatgtcttggatttagccttctctagggctgttctcagatggggatgctgaggtacctgagtgaagaggctgagctgggggccaggggttgggggagggatgggaatgggttggacccagggcaaaggaacccatgggtgttgggtggaaaatcctggaggcttcctaatatcagagggagcagagagagccgactgtagtttcaaggctttctctgtctcccaccccctatgctcacacagcaaggctatatgttagacttgagcagggacttccaggtggcaaatggagcctttgcagggtggcgagaggcttgggatgtgcctttgtggcagggctgtcagggctgtgggagatctaagaagagccgacatgagctggcagggctgagggcgagggaggtaggaggaaaggctgtctagaagtgtaggtaggccttcttcctttgggcagaagaggagatgcaagcctggccagtggggtgctaccctcgttgtaaccttcaggcttctaccacatgtccatccccccatggtcctgcaggctagacggggaatgctttgtatttggggctggggaaactgaggcatgaaggattgcctcagagctcaaaagcaaatggtgagagaaccagggccatgacctgggttacccaacacgcctggcctgacttgtccgtgacgttcacacttatgctggcagatgtggacagtaaaaacaacaacatggctatccttagttgagcacctactgcatgtggacgctacactgaccccttcacataggtcctctccaggacctgacgaggtgggggctgtcagcggctgcatttcactggctaggggttgggctcagcgagggtcagcaacctgtctgaggtcacctaggctggaggctgcagagctaggagaggaatcctgactccaaagccccacttggaccctggcatggcctgagcctgtgtctctgagatgaggggctcccctcgccccattacacacaagatgtgtagtgttcctagttgagccagccccctcccccatgcccagctccttaactctcctaggtccctctgctatctcaaggcactttccaggtttgaacctaagagcattggaactgctaacctaaccccttaactccagggaggagggtggatgggtgggtgggggatcccctgaggagcagatggatgccccttggggtttctgggttcttcctgcagacaggttctgggaaactccatggttaggcctgtggaagctgcctcggggcctggtcagggttgcgcacctcctccaccccctccccaggggctccatttccctctcctgggcaccctgcagggaggagttgagcaagtgcccttgagctggcacttcctctttggtatacagggacatagccacaatgaccccccatcccgtggtccgtgtgtcacttagcaccaggcgctgcatggccctgggtcagggctcactaaaggtcacttcatcgggttgactttactagaggctagtcccagcctcagatcatttcccctttctggtctcagtttcttcatctgtgaaatgactgtgcgagtctgccctgcgtgctctctgaggcaggggtaagttcattccccgcagacagacacacttaggagctttgtgactggtgttccagtcccccaggcccagagctcctgtagccctgacacctgcacaggggtccaggggaagaagtgtgggctctagagttgggccagccttcttttcagcctcacctccactgtccacacttgcttgaccttgacccacaccagtgccccactcagctctgagcctcagtgtcctcatctgcaaaatgggagaatcatgatgcctacctctgtgggttgctgtgaccatcaaacaagatgatgtggacagagcacatggcacagaactgatagagtgtggtgacagcggagcccttccccccagactatcctcctggtcactgtaccccagccttggtcttgaggattctgggaaggagatggtgccaatctgctggctcagccagcttggccactgaccttcagagcacccaggctgtcaaggccgccaactgcctgctgggcgggcaggggggagtgccagccagctcctcgcctgacgctgcccgctcctgctcccactctcctctccctctctgcgcctgtgtgtgagctaattaatctcagcccctttgggaaattagaacgccgcagccgcggcctcctcagcctcgcggtgcttgtgctgctactgggccatgccaagacccgctgtggtttaggggcaccggggtgggggatgggggcaccgggatgagctgggccggccatgggtctcccagagcccccacctccttgctggaatgctctggtctctcagccccctcctttcccagatagcatccataaggatgccaggccagtgcccaactgtggtaaaacctaacccccagtggcctctctgacctggtcccagggctgttatggccacccccttacaccacattccatctcattgcagggtcctcttgcctgcccagcttgggctgatggagacagatgtaattatggaattttgcttgggaaattaatttgaaaaagttaattaattggtggttccggaggtggcgggctccacgcccggccagtcttgctgacgtcagtgctgacccactggagacgtgcagcttccgggcaagctgggcagagggaccccggtgacctggctgggcagccctggaacaggtagatggacagcgaggagcaaagggcagaccagtgtcctggcccagagtgggcacctgggaagggtttgttgaccagacctgctgaggataagaacccggccacttgtttgtgtgttcaacaagccgttgtcaagctgctatggtacactgaccccagtgtctcaagtgcccccaaccaaaaatagaccagttcttccaaaccccttttctcaaggaaaacctctaaacctattctcaaaggctttttcaaagggctcaaaggacattatcgggccagtgtgcagatgaagccactgaggctcagagagggtgggccttgcccggcttctcagcagtgtcctccagcagggtggagcagaggtgggtagagctcagtctcatttccagaggacgtgtgccccagcttcagaatcccatgggcggcctcctcccaagtatgggtgataggggccttgaagttgactcttcccagggaggaagccacagaatatggccagccccttcacccccttcacccccatccctgtgtgtgcctgtgggagcttcccctactaccccatccaagcctcagaagacccccatgccccaggggtctcagggtacacagagacccccactacctcctggacctcctgtgggtcttctgaccacaagcctcagccagatcaagtcctagtttctgcaggagcgtgggctttggtgtggtctttgtccagacaggagaagggtcagggctggggcaagaatggccaggcctgggacaggtcagggatactgagccacaaagaggccagggagatgaacgtgggcgctcctgagctatgtggccttgggcaggtcccttagcttctctaagcctcattttgctcatgcgggaaatggggatgatcacagatgccattcagagagctgcggagaggtgcagggacgcataaccacttgaagtggtgctggctctggcgcaggctgtttcactgcccagtggaggcaggctgggtggaagagcagtgagctgactgagactgtgctgtggctggggcctgaggaccagtgggttttgagaggggagcctggtgcatgtgtcagaggaactgaagaatacaggagatgatatttgtgagaccctgggccctgctccaacggagtcagcccacccagcatttaccctctgacttgtttcttgtgttccctcacctccaggatttccaggggccaggtgggccctgctcagtttagtatgcctcacctcccatagctgttcaggatcaaagggagcatcatgggcaggctgagctgggcactttgcatccctgtcactctgatgtggtctgtagttctgggtttcttcaaggtccaaccccagtcttgggtttaagtgggtcacacccactccctgagcatcctgtgtaggctggttatggggtcagaggagaggcatttcctcctcccacctcacctcctccaagaagccctctgggtactgctccccagcactttgcccattgactgagcactcagggttctctgcacagacttttttaaacctttctctgtgtgtccctacactgggagctctctgaccacggggtccatggtatctcctgtctatcctagtgcccagcactgggttagcactcaatgtgggggcatagggctcttgtgcccctattttacagatgggtcagttaaggccctgcaaggtcacacagcctgttgaggggcagagccagcctggttcaggtgggtgtggggccacttggtaccggctggggtcttctttcaggcctcaggaccattcctaggcttccttaggccctgcagctcctgaccctcctggcactattcctggagggtgaatagtcagtcctgtgctcttaagagcttgggggtttgggggttaaggggttgtggcatcagactgagggtcagagggcaggcctatgagcttcagtttcttcatctgtaaaacagatcttagtgtttgggggagcaggggtggctgaaagagatcacgcatatgttgttctcgccatccttattattactactgacactgttattttgttatcattacattattattcatgctcccagggccccagcagctgcggtggctccaggcctggatgcagagctctggtgtgctgaaaagaagttgcagttcctaattagtcagcgctccaaggagagggcctgggttttaatttttgctgcagggtcccacctgcccgaggcctcccagcccctctcatcccttcctgggctgggcctgcggcaccctccccaacctcaggtagggggcctggcccgaggcaaaaacctccccaaatttcccctgccactccctccgcctcccagacctctggggccatgaatcatttatgaggcaaaaatgaaaccaattaaggacaaactttgaaagcctctaattgctgcgcctggtggcaccgtggaatgaggggaggccagccttctcggtgcggaatctccttggcccaggccttcccaggctgcccgtcccgccgcggctcagggcgcctcccggctccctgccgcctcccagccggacgcggacgtgcctgcgcggctctggcggccgcgtctgccgccccggcgcccgcccgggtcccaggccgactaattaggcccggctacctcccgcgccgcccactgcccgctccaggcccgctgcccgctccaggcccgaggtgatggcggctgttcctgccgttctggggcctgtgccccagagctggccgcgtttctcggggcgggagccagctctgctcgcctggcttaacccagacgagcccaggacgccctatccctgaaccccatcgtggcgtgcaggtctgagtaggctctgggccatgccggggtacctggcttggaggctctcttcagtctcgggagagatatgcttatcccaggcggagcggagaaggctgggggatgactgatagggggagtcgggaggggatgttgagccctgaggtgttgcactgagcacggatccagttcctcttggctttgccacaaacacagtgaccttatgtagagtccttagcctcggtttccccgtttgtaaaccatcagcaccagcccattttctcctgaatttgggatttagggagctgggctttgtatacccctcccagtctcctctcttggggggttgctgagggggtggaggtaatgtctggacctagcagggcctgccttactgccatgagccctggatgccagtggccagcctgctcgctgtgctgagggccaggcaggccctgggcactgaggcacgttgtttgctgaaaccaaatttctgtgcttgtgtttttccataattatattagcaggtgggatttttcctcggggaagcagtgggagggggagcgccatggcagtgtccccgcccgctctaagcgtgagctcacactcagctctgcccgcctgccgtaatgattttttaattatgcagccagtgctcggaattgctaatccccctccagccctgcatcccctcctgcaactcacaccccagcccctggctgatgtccctagagtggcggtgcccagccccgtgcccatcactgagtgcttgggacaaccgccatagcgggagagagggtaggtcaggaagggccggaggggcgcccctccgccatctgcaagtgacaagacttgtggctctctttgtctcccaccctacccctagacccagcatggctcacacctgccaggacagctatggctttaaatgagtttggggagtgatcggtgcccacaccaagtgatgtggccacactcatttcatggacattagcctgtcttcccagccttgtgtgaccccaaggacacaggcacacaagtacaatttttgtcacacccatactcacgctttacttcccttctacacacacactcagccccacagccaagctacacacacacacacaatggcaggctctgcgtgcttctcacacatgtagccttacctgagggcgggggcaccctcaggagaccccactgctgcctcctgtgccctgcagtggccctgctcccactcccttgcctccagaccccccaaccccatccccatccaccctactgggaggtgctccgaggtcttctggctcccgcctcatggggtggctgcctgtggctggggccagcctgagcctccatcgaccctggcctgggggaggtgctgggggggttctgcagcactgtggcggcggctcctctccaggcgcccagctgtggcatctgtcaaggtcagatagcgactccggaaccagccggctcggccccatggcccctctcgcctcattatttttgtgttccggggctgcggcgacacctccctccctcctcctcagcctcccgcctctcgcctgcctcccccacgcctctgcagggagggcctgcggtctgggggcttttgttttccagttttttccacgctcaggccaggcaggcgggtagacactggccagagctgttggaccttgaacagcagacaagacaggtgtcccccttagagctgggacagattctcagctagtggaaccctgggttggtttctcagaggcacaaactgaacctggatggaaccagcccccaccacagcccaggtgcacctgtgggcagcttcctgtttccataggggccctagcagctggcaccagttcctgtctacaccatccccgtcccagtagggccccagactcatacagcccagagctcctgacacaactcacagtgcatgcggacatacacacactggcattcatgcggcaaagatgtgttgacacgtacagaccagaagactccacaaacatcctctcaccacgtaaaccaccctattcgcacacacgtgcacttggacatccatgtacattcacagacttgggtcgcacacacatgcctccactttaccctcagggaggtcacagagtcaaagatctcccccagcactgctacatgatccccatatatgctttaatgctgtggtctgtagagggcgacatcttgagactacacactcaaccgggcacattcacagtccactggacacacacacagttgtgcagcacacctcccaggtagacacgcgaaaacacactgtatgcattgctctcgtcaccatacacactccagccccctgagcccgctcccaggtgcccagcatccttgggtagttatgccacccgaggggcttttgtcccccgaaatactgggaagtgagcttgaggcctcagcttgctgagccctgtgtccagggagcctcggagagtgggaaatggtttgacaaggactgcccggcccctgcccaacctcactgtgtacaccactttaggcccaagagcgccaggatggcgtgggatggggcggggggttccaggtgtgtcatgatgggcttggtggctgctggcagaggcagactctggggggtgacctcagctctgtctctgggtccctcctcccacctccagcccctgatttgggtgtgtaaatgttggaggaatggggtgtgggcagactccaggcccccagggtctctagagtggccctggccatcccctctcttcctcctccagctgtggactgctgtgactgcccccgggagaggagctagatggaggcttagcagtggctgggcccccaccccccaggaaactcaaaaccctgggccagccgcgggtggcgggttggggcaggcacaaagagggcctctgtgcggccggctgggctgcccacaggattctgggggaggaggccggagccggtttccgtcccgttctgcttcctgcggaggctgcggaatgcccggagctctggcccagcctgccccgtctggcccacccgcagccccttccccatcttttccagggccttggggtacagctgcagacttctctgcaacagggccctgagagccaccctccaggacccaagggaaacctaggggatttccccaagccgagagctgaactggacctcaccctttagctgaagtcttccttccctccatgtgctgtggaaccctcagccagggttggagcaccaggccctggagtcacacagacctgggtttaaatcctggctctgccacttactgaccttgtgaccttaggcaggtggctttatgtccctgagcctcagttgcctcatctgtaaaatgaggataataataattgtagtagaatccggtgagaaaatgcatgtgaaatgcttagcacagtgcctggtggacagtgagtgtgcattattaggacctgctgtttatttttttttatttatttgtttgtttgtttatttattgttttgagatggagttttgctcttgttgcccaggctggagtgcaatggcgtgatcttggctcactgcaacctctgcctcccaggttcaggcaattctcctgcctcagcctcccgagtagctgggattacaggcatgcaccaccacgctcggctaatttttgtattattagtaaagacagggtttctccatgttggtcaggctgttctcgaactcccgacctcaggtgatccacctgcctcggcttcccaaagtgctgggattacaggcgtgagcctgtacaggccagggcctgctgtttattttaatgtcctctggggaacttaagagtggaagggactggatgctccttgccacgataggtctcacctcttctacggttcagtctcagccctgcgtcctgctcaaaacccttctctcaaatcagtttcctatctgcagatcatatcagtgactgatctcggcctctggggccttcctcctgaggtctggagggtggaggggatcgctgtctggaatcctttttttcccctctgtatctctacctccttccccatgatatgccctgggatcgtgacttctgcagtagtttggggtgagaagcaagagccattcctttccattttacaaatgggaaactgaggcttagtggcggaaagagcttggtcaaagtcaccagtcagggagggacagggtggagccacaaacctaggcctcaggcctccagttccctagccagtcctaggcacatatgcctcccccaaccccagacacacaaacacaccccacacaggagccccagaaggacagtgcgccatctctgatttcttgactcgtgcatccctggactagccttccctggcttgtcccatggtgaggcccatcagtagggaggtcctgagggggtacgtgggcctgatttctgattggtgtcagctcagagatcaccacattgggaaatgtttactacaagattcaggggatcccagatagacaaggcgtcattacacctgcttaagcaaattgcctgctctaaatggggcaataataggacttccttcagagattgggtatgaggataacatgagataaagcatggacagtgtggcacataggaagagccccatacttgttagctatggtcccaggtgacagatgggaaaactgtctcagaggccagttttttcccaaggtcaaaaaatggggaagggtcttcctgaacctttgactcttccaggaaaggaacctggcctgagggaggtgcctattgaggaaagggcctgtctttatcagaggcatcccaggcatctcagtccctagagccccaggtcagagcttactccctgcccggggcctcagtgttgctgtgcatgaatgggctgatcccctcctccagctgttttggggagcaccgtaaaacagaacagagcctggctgggtgcggtggctcacgcctgtaaccccagcactttgggaggctgaggtgggtggatcacctgaggtcaggagttcaagaccagcctgaccaacatggtgaaactccatctctactaaaaatacaaaaattagccaggtgtggtggtgtgcgcctgtaatcccagccactctggaggctgaggcaggagaattgcttgaacctgggaggcggaggttgtggtgagctgagatcgggccacgcactccagcctgggtgacagagcaagactcttgtcaaaaaaaaaaaaaaaagagagagagaaaacagagctctacatactccaggtttgctcaaaccctttagtcctcaggccaaggcatggttggcacccaccccagcaggaggggtgtaagagggtcaggggtgtggagtcggggatatagaaatgctgtcccttgttctgtccttggcagtcagtcttggggtgactctagtggggttgaggccatgtctcaccccaggccaccctctgggtgctcgcagtggccagtgtgtgggggtatgtgtgtccatccatagctggatgtgtgccctgtgctctccgcctggggctgcgtttctccctgcctccaagaccagtctccctgggcttgagcagggcttctttttccctctggaaactccccaggctgaatcatggaaatcagagacgggacaccctcccttccaccccattgcccagcttggttcaaccaccatagcctgtggtctgctttgcccaccatcagcctgtctgcgtattttgcctcacttggaggcaggccaaggagaccggcccaccaaggtgggggggaggagacaagggccgggatgtcaagtgctgcatggaagcgtggaaagtggtgcattgagccagggtgtgcagctctgctgggccagtgttgggggtcctgaaacgcagcctcttccacgagcctccctgggcaggcagaatggctgcaaggctggtcagccagcaaggaatggcggggatggtgccttggtcaaaccctgcccttggtagtggtgatggttgcacaactttgttgatttactaaaaatcattaaattatatgtatactttaatgtggcagaattttatagtatgtaaactatacctcgataaaactgttttttaaaaatcctgccagccaggcgcagtggctcacgcctataatcccagcattttgggaggcccaggtgagaggattgcttgatcctcataggaagacctcatccctactaaaaattaaaataataataataataaaaattctgcccttggcctcaaggccctgcacaactgggaccctgacagcctcatagacacacctcacatcttcttccccacctgcttaggctctctttcatgcctttgtcccctctcattgcttctccttatccttaactctcaaactagcagtcccttcctccaggaaggcctcagatagctcattgtgtccccttccggctcttgtttcacgctggttcatgtgactgtgggcccagctcctgtgcactcctggaaggcagtgctggggtctgggtctgtgtgctctgctgtctctccggtatcataaggtacagggctgctgtcgaggtaggtgcagggaagatgtgtgcaaaggaatatctagaacatccagctgtgggccacctgtgtacatgtctgtgtgcagatggcactatgtcatcccaggatgtcccctccttcccagtgctttctggcccgagagttcaagattgaaccctgcggggggtgaagtgaggctcttctagggctgagggttgaataagggcactgccaccacctccagtgacctcactgccagctggcattatgatgtcactggcttagcattccaggccctgggcatctccaagtgccccaggtgggggcactctcctggggtctgtgacagcttgcccccaaccacggagaggtgacaggcacggtaacaatcctggggagtgagagcagccttaggggtacctaggtcacctgccttgggccactctgtcaattgcaaaagtggccacagaacagggtgactaacacttgggctctgggttcaagctctacccctgctaggcaccagctgtttgacctgaggctgacagcttgaacctctctgagcctaaatttcctcatgtctgaaattggcaaatagtttctgtctcccggggttctggggaggcattcagaagctaagacatgtaaagcataaaagcacagggcctgggacacagtagatactcagtaaatgctggttgataggatccgttggttaaggaaaccagagtggcaacacaggtggtgggggctggctagaagggggcaggctccgtgccttctggggctggccagagccttagggtagaggcacggggtggcctccactgccaggaaggtggccccaggtatgagtctccctccttccagctcagccagttagctggagcctacaggaggcattgggccctgcagccatgctctggggccaagaacccattaccccccacctcctcctcggtactccccagtcctcctccccagcctcctccccacctcctcccaagtcctcctcccctgtcttctccccacctccccccaagccctcctccccacctcctccacagtccttcttgccaccctcctccccacctcctccacagtccttcttgccaccctcctccccaccctcctccccagcctcctccccccaagccctcctccccacctcctccccagtccttctccccaccctcctccccagccctcctccccagactcctccccaccctcctccccaggcctcctccgcagattcctccccatctcctctccagcctcctccccacctcctccccagcctcctccccacctccccccaagccctcctccccaggctcctccccatctcctcctcagtccttctccccagtgtcctccccaccctcgtccccagccctcctccccagactcctccccatctcctccccacctcctcttctcaggccttgggctacacagtgggtctgatctggtctcctcgccacttctcctctacccttccctctgcctccctctcctgtgggcatgcccagctgccttctgggattccctccttagggctgtttccttgtcttttagaccctcaagtccctgagcctggacaaggtgtcctgggtccctgggtctctgaaccctgttaccccagacactgcttcccatgacactgtctccactaaccttgaccctctgccccttcctctccagctccccttttctctgatcctcccctctagttctctgtctcatgattctgtccccaccacctgtctctattctgcccccgcatgcccctctgccccccagctttccatgactcgtcccccctcagccccccgtgctctgtccccgcccgtcagcccctggtcccagctcccggctggccggctcctgcatggacaaaggggtcctttgtgggctgaccgcggctggcggggcggcggggcgctggctccgcattgctgatgaaacggagccctttgttgtccctcctcaggcgcagtatttctttttgggggctggatgtgttcctggcagggccgatgatggatgcgcccgccgccgcccgcctgcccgccagctttccctcccgctcattcccgctccgcttcaacgcagccctgactcctcccctgctgcctgggcactgccaggcccttcctggcctggaaggggatggctgtgtgccctagagtagaagactgggacctgggagaacgtcccctctatgtcctcctcttccatgagtagggcaaatggggcttttggtcaggggtccactgggaccaggacatcagtttttcctaaggtctgaaggagaagatgagccaggtatcagggccgatttggaacaagcttgaggaccagatgttcatgtctgtctactctggatttgaaaacagagttgtccctgtgagccagtccctccgtgtacccacctcccttcaacttctgtggctgaaaaaccatagtgttctgcctgcagcacctgtttggtgacatatcacatcctctggtcccaagctcagtatgtcccaggacctcagaggctgggggtgggtgggccctgaagaaggatagaatagtggaagatcagagaaattccaagagaggaacagaacatgaggtttggtccccaccaggagagactcaggacggagacaaaagccgagacactcagccagagcgccagccctgagcgcaggccggctgtgttggaaggagctgacttctaattgacctgcccgccccgcacgcagagccagatcctggagctgggaggagggagggggtgagcagagcaggaacagcgttaatgcagctatcgatttctgccaccagccagcaggccgcagaggcgggggacgcacacaggggctggggcgcagcctgctcccctccccatctctgcagcccacaagacacctgccttctgccttctcccctcacccagtatctgggctgccggggttgtcgtccagggcagggcagatgagcttagttgggcaggagctggatgagctgacttgacggtttttgtccctgatctcactgaccctggtccccaacaactagccagggtcactgattcctgaaagggtcaccagtctctgaggagaggggctgaaaagaccatcctggtcttggccgttatgaggtgggagggaacacagctatccttggacacacatggtcttcttgcttcagctctgacctctgatgccccccaacccagcctggattccctgccagggccccccggctctgtcctggtggaatctgccatcttgcccagctcttcctcctcacccatttccctctgctaggaaggagccctaggtggtctggtgcccactggggagggacagggagtatctgactgttgatggcggctactcgcctcaccctagagacagagcttttcctttccccacacccggtcctctttggccactccttagtcctggggaagccccccctcccccccgcttggggcctcagtttccccctctgtaaatgcagagggttggactagatgctctcttgggacaggcttgagtcctgtgactaggggggttttggggttgcctggggacaaagatccagtgtgtgctgccctcaagcccagggcgtgatggggcccgccagatgtgcgcctcccccttgagcctccagctgctctggggctgggccctgtcctcccacccctctcttggggcatgctaggccacagcaggcagacagggaagcaaggctggagagccgggactgatgaggaaaccgccgccttgctccatctggcccagtcccttcagctgaggaggcagctcagacgccttagccttgaaacctgagtagagcaggccctgccccgggatgggctgccttggaaatatggaggtggccagaggacaggctcctgctgggctccattcccttgagggtcacgcctactcctcagtgccagcctgccccagccagaggtccctcctggcaacagcccaccccggctctctgggttctcactgagacctccacccaggccctactctgcaggccttgtgaggcctctgcccaccaccgcccccaatctgggagccaggccagagcaccacagtgaggcctgagtagagacaagaatgaggtctgagacgataatgattgtggttcgggggttgagaaggaagcgtgtgccagggtgtgcacaagcatgtcctctcactgtggcaggggacggctggtcctctggccctgtgctgctcgccctgtagcaggcggggagaagatccctgaaataagggttctgcactcattggcaaactgggttacacaaaggcaaccaggttcctttgcctgcaggacatgtcagagccttgaaataactgatgtgtattagtaatccccagatgaggatccaggggcagccttccagacttaatgatctgtaccatcaagcactcttctcctcagatggagaaggaagattaggatgtggaggtggtttttttcttatttttatttttttgacaggatctcactctgtcatccaggctggaatgcagtggcatgattataactcactgcatcctcaacctcctgggctcaagcagtcctcccacctcagcctcctgagtagctaggactacaggcatgtaccaccacacctggttaacttttgtattttttgcagagatagagtttcaccatgttgtccagggtggtctcaaaactcctgagctcaagcgatctgcctgcctctgcttcccaaagtgctgagattacaggtgtgagccactgcacccagctaataagcatctccaacactctcccaccccagcacaagaaggactgcctgcttctggcaggtcttcctagaccctagcagagcagatttgggctgtggaggcctggactagggcctccaccatgccgcttggtggctgtgtgttcatagactggtagttctcctaaatcttgtttccctcatctataaagtagattaccagccactgcttctagagttcttgtgggtcttaactgagatagtacaaataagaaatttctcaccaggatggatctggtgcttaataaatgcctggtcaagcacatggtggtcaggatgacaggaccgttgatagtggcggtggtggcgatgttgaagggggaggtgttcactgctgccctgaccctgtatcctcttgtgacagagtgaagacatttccacctggacacctgaccatgtgcctgccctgagcagcgaggcccaccaggcatctctgttgtgggcagcagggccaggtcctggtctgtggaccctcggcagttggcaggctccctctgcagtggggtctgggcctcggccccaccatgtcgagcctcggcggtggctcccaggatgccggcggcagtagcagcagcagcaccaatggcagcggtggcagtggcagcagtggcccaaaggcaggagcagcagacaagagtgcagtggtggctgccgccgcaccagcctcagtggcagatgacacaccaccccccgagcgtcggaacaagagcggtatcatcagtgagcccctcaacaagagcctgcgccgctcccgcccgctctcccactactcttcttttggcagcagtggtggtagtggcggtggcagcatgatgggcggagagtctgctgacaaggccactgcggctgcagccgctgcctccctgttggccaatgggcatgacctggcggcggccatggcggtggacaaaagcaaccctacctcaaagcacaaaagtggtgctgtggccagcctgctgagcaaggcagagcgggccacggagctggcagccgagggacagctgacgctgcagcagtttgcgcagtccacagagatgctgaagcgcgtggtgcaggagcatctcccgctgatgagcgaggcgggtgctggcctgcctgacatggaggctgtggcaggtgccgaagccctcaatggccagtccgacttcccctacctgggcgctttccccatcaacccaggcctcttcattatgaccccggcaggtgtgttcctggccgagagcgcgctgcacatggcgggcctggctgagtaccccatgcagggagagctggcctctgccatcagctccggcaagaagaagcggaaacgctgcggcatgtgcgcgccctgccggcggcgcatcaactgcgagcagtgcagcagttgtaggaatcgaaagactggccatcagatttgcaaattcagaaaatgtgaggaactcaaaaagaagccttccgctgctctggaggtaacggcgccttagagggaggtgtgtgggctcttgtgtctgtctggcagtccaaacccacccccatcccctgaccccacttttcctacctgggcaagtgtctgggggatgccccctcccagtccttggggcctgggggtctggcttcaagacaccagtttactgccccaaaagtcagagccacattctgagaatcctatcaggccataatttgcaaggcaagcataaaactccaggcaaggacctagcattctcagccaggccctgggattctgattcctctcctgggttctgggtcaggtattgagatttccatacaggtcctaagtttctgatgctcagacatggcctaaagcatccagtccatgacctagaactctgggtctctcccctgccctgtttaagggattctgtttcacgggccctgtgcccttaagcccttcatttgcccctccagggccatctttcccccaaggccacccaaggatagagctgttccagtgctgggtgccctgctctgaggcctggaaggacccttggtctgggcacctagttgacagatttttggggctggggtaaggggaggtgaccatgagcccggagtggacaagaacctagccactgtaggattggcttggagaaggcaaggggttcccatgctgctatctctgcacccctgtggcagggcccgtccctgtgcccccagatgcagcaacctagctggagtgccaggcctgggtacaaaagcatcttttcagcctgcagtccctgcccttgtccccgcccctctatgagtgggcttgacgcaaatgtccagaatggttggaaaacaacagtggtatatcccagccatggcctcctggttaccctcccccaaccccagccccagccccagccccagccccagcccttccatttctgctctcctatgtacacacaaaggcacccactttagtccagtgtagacacacatgcacacacacatagacacggccgcttgagaaatagctcaaatacccacctcccacagctccataccacacagctcagcatagcacgaggcacacacccatatgcacacccgtcgcacgtgctcacacgctcatttacagaaacatgccacagccacctggcgctgttgcctttgggccaggggaagggacttcttctctggaaggagggttcctgggcacagtggctcaggaggcctcagagtcctcggggccttccagcagcccagcaggtcaagcgcctcctttggcctggctggggtggcaggagctccgaggggtggctgctcttcctccatgcctgtccctccgccatgaggccatccatgggggaacgtctttgctccaggcctacccggaccctgactgaactctctccttgtttttgtctcccgcccccgccagaaggtgatgcttccgacgggagccgccttccggtggtttcagtgacggcggcggaacccaaagctgccctctccgtgcaatgtcactgctcgtgtggtctccagcaagggattcgggcgaagacaaacggatgcacccgtctttagaaccaaaaatattctctcacagatttcattcctgtttttatatatatattttttgttgtcgttttaacatctccacgtccctagcataaaaagaaaaagaaaaaaatttaaactgctttttcggaagaacaacaacaaaaaagaggtaaagacgaatctataaagtaccgagacttcctgggcaaagaatggacaatcagtttccttcctgtgtcgatgtcgatgttgtctgtgcaggagatgcagtttttgtgtagagaatgtaaattttctgtaaccttttgaaatctagttactaataagcactactgtaatttagcacagtttaactccaccctcatttaaacttcctttgattctttccgaccatgaaatagtgcatagtttgcctggagaatccactcacgttcataaagagaatgttgatggcgccgtgtagaagccgctctgtatccatccacgcgtgcagagctgccagcagggagctcacagaaggggagggagcaccaggccagctgagctgcacccacagtcccgagactgggatcccccaccccaacagtgattttggaaaaaaaaatgaaagttctgttcgtttatccattgcgatctggggagccccatctcgatatttccaatcctggctacttttcttagagaaaataagtcctttttttctggccttgctaatggcaacagaagaaagggcttctttgcgtggtcccctgctggtgggggtgggtccccagggggccccctgcggcctgggcccccctgcccacggccagcttcctgctgatgaacatgctgtttgtattgttttaggaaaccaggctgttttgtgaataaaacgaatgcatgtttgtgtcacgaagcaccgctggcttcttgctctccggttttggggggctgacttgggggccgttcctgagcagggattgtctgggaccacctggaggaggaagaaggatggcccagggacatttagaatgggaatttcttggggaagagaggcctctggatccagaatgggggagagcaggagcaaccagcccagcagacaggagggaaaggctcttaatctggaagtcactgcctggttgcaccccatgcctcagaacctggacctccagggaccttcactcacttggggccacctctgttcactcacctaagttcatcagggcctgatgagtaaagcaaccagcaccacgaggcaggtgggggtaaggctgagctgcctgttcagggtcttctttctttctttcttacctggcagggatctagtgctcccgcagccaccaatgtcattctccagggaatagtttcagctcggcttcgtggggacctggctgtacacacacgcctattcctctttaggcctgagggctgctaggctgagttacgggggtgtccttggctttgactgtccccactctcagagggtttgttggtacaaggctgctggggacctcagaggtcaaatgtctggggaagtcaccacacagccacatggtctgggccagggcagcctgaacaggaaggggtggcagtggcatgcccctccctgtacatcacagaggccaa

SEQ ID NO: 139 - DNA, 10795 bp, Homo sapiens
  source 1..10795: mol_type = genomic DNA
gctgggactacaggcgcccgccaccacgcccggctaattttttgtatttttagtagagacggggtttcaccgtgttagccaggatggtctcgatctcctgacctcatgatctgcccgcctcggcctcccaaagtgctgggattacaggcgtgagccaccgcgcccggccaaggggctgcagttctaagcagagggtcagggaggcctcgaagacctgaaggggaggaggaaggagccaggcagccatgcagggaacagctccaggcagcaggaagagcccatgcaaaggccctgagaagacacatgctgcgtgtgtccaagggtcagagagtggcctgcgtggctgatgccaggtgagagggggaccgcaggggcagggcagggcgctgggggtgcagatcatgtctgccctggggccatcagaagcttgtggctgtcactggaggtagctgagcctgtgggttctgagcctgcggattctgagccggaggcactggggtgaggctttgggtttcaatggcagcatcaggatggtttcaggggatgagggcagagcgggaggcggcaggtggcctgggtggggatggcccatgtagctggggtctggatttgggccaggattggatgtggggtgtgggggtttcaagggtgacctgaagcttggtgacctggggggacggctgagatgaggctggattgagacgtctgtatggtgccgagtgttggctggtggggggtggattctgaaggcccccaggaacagaggaccctggctctgaagtgtgagttgctgggagagcaggtggacaagcagcaggcaagggcttctccggcctcaggggagtgggtgccttggcgagagcccaaaggtgggggacgtggctgacgccgggcaaagctttgggggcaccgggctggggtggtggtgaggacctgtgggcaggtgtgtgtgcagccagccacagcctccgcacaagtgaggggaaggggtggccagaagcccctgcaacttggcctgagcgtcctgggcagctggggggccccccagcatcagtgtgggggcaaacaaggccacatccgccaccagcttcaccccagcttctacggaaaagaggcgcagggtagaggctcaccacgtggctccgaccctgttcccttttcacttaacgccagcggcctcctctggaatccaagccccttagggaggcgttaggtgtggagggcctgcagggcctgcaggagctgtcaagggaggactctgctgcctcctccaggcccgggaggacctttctagggaggcacacacctggaatccaggtactatatttcgtggaatatacggtacccgggatttcgtgtgctgctgagaaggaaggcgatgctgatgttaatgaaactggaatgcggcccggctggcaggaaacggggtgcctgcccaggcctcgggaaccatcgctaccccagccccgcccaccggccccaggcagaggctcacgcgctcccggcttcgctgcatttattgcaggtgggtgcacctggcgggagggcaggtccggggcgaggtcacacgacctcgtcggtcaccgggatggggttgacctggggacctcccgggggtccccccgccgccaccgcagcctcctcctcgctgggcttcttgcgggcctcggccgggggccgcggcggggggttgctgggcggctgcttgatggtgcctccgatctgcggccgctcccggggcttgggctcgatgggcgtccactgctcgccacgcacagccgcctgcggggcactgaagggttgagccgcgccccagcgcccgccctccctccctccctccctccccggaggcccaccccgctaggggccctgggacaggctcaagtctgaatcccacgcaggatggtgtgactgccactcagagaggttaagtgacgcgcccgaggccacacagccaggacctgggtcggcctgacaccagcccaagctatttcttcatgccaggagtggggcccgaacccctgggcttctggaagatcccgtggtggacactcccagatgcaaattctagtactcaaattctcctctcaaggtgccaagggcagggaaggcagggaggcaggcccgaggtccagcaggaggggtggcccaggagagtagcaggccctgctccgtctggtgggcgccattcacccacgctggccggcagccccccaagggtgcccaggcatttctgcacatgggggtggtggggggagagcttgaagaccacgggattccactggcttttactaaaaatacagactcctgggcccatgcccggaggttccactgcaacaggtcaagtggacctgggagtgtgtgcttttcatcttctatcccataatatctggtggaaaaatatgtcacatcatatacgtcatgaacagaaagagaaactggacatgtgtgatcctacctgactccaaaacggaaacattccattctgaaaagcaaaactagaaggctgatagaagaaaaggcaggaacgtgaaggcaggacccagggccagggaaaggtgttttcacaaagcacagaccatagagcaggtgaacagggaaacctctgctcttccgtgcagtgaaggactccacgcgccaagttaacagaccctcaccagaaagcatgaaggcatccccagtgtttaaaggttacaaaggctaaatagctaaaatatatgtggacttcctgcaacttaagaaaaagacaatcaggccgggcgcggtggctcacgcctgtaatcccagcactttgggaggccgaggcgggcggatcacaaggtcaaggagatccagaccatcctggctaacgcggtgaaaccccgtctctactaaaaataccaaaaattagccaggcatggtggcacgtgcctgtagtcccagctactcgggaggctgaggcaggagaattgcttgaacccaggaggcgaaggttgcagtgagccgagatcacgccactgcactccagcctgggcgatggcgcgagactccatctcaaaaaaaaaagaagaaaaagaaaaatacaaaaaccacaatagaaaaatgggcaaaggatttgaacaggcaactcaagggagaagaaactccaacagctcaaatccacagtcagagaagggcgagtccaagctccacacggccagctcgtgctgtgaaactggcaagcgtgggagaaagcctagtgcatggtgggagagatggggccacatggctggtggtgggttgtctgctgaggagcagctgagcccggcagggtgaacggtgcagaggctgatgcctgacccagcaattcctctctgggtttagcacaaggaattcctcccgaggtctccaggagccactagctgtgcgtggcagcagggagacgggggggatgcgggtggcccccggaaaacaaagcaacagcccagatgagcacttggcaacaggaaggggttctaaaggagagttctgccggtggcaggtcagtgaggcttgaaacagaactccacttccatacgcggaaggcgtacacagaaagtgctgcacctttcccacgcacacacactagaagacgcacagcaaggggagggcagttgcctctgcgggcaggagggacttggctctatggacaaaaggatttaaataagcaaagtctgagggctctgtccacccagagacccccgcagtgagaggtggcctgcagccgtctgttccggagcccagggcaggcagagggcatttcacccaaggcctggccaggctgcgccctgtcctcccacccatccctggcctctcagagagatcactgtatcccatgggatgggcagccttctaacagggtgcagcagtcataaaccaaacgcaggtgtcggcagtttaagaaaatgtctgcgtcctggcaccgcccatgaatcagcgcgaatagggtttaggtgagaaaagcctgataatgggacccaagcgcaggcacggtcttcggccggctgcgtgaccccaggccagtcacagcacctccctgagcctccgcatctttgtctgtaaagtggggaccccagtacccctcccagggctgtggtgcgggttaatgaggaaatgcaaggaaatgacccgacacactagacacgccaaaaatggcagcagcaaccgctgcgtccccgccgtgctgtgagcacacgcccaggctcacacttgctcccagccttggctcagcctacagagccggcttcaagggccatgcgtgtccgagggtgtcagggcaggggctggggatgggggtggccggggccgacctcagagggcgccactcaccagtaggtagatgccgctcgcaatggccaggcaggcggtcccaaggatggtggccagcaggaagccggcgggcaccgagagcctgggggacagcgggtgagaggcagggacacagaagggcactcagaaaggggaacggagccccaggtctgggggccaaggccacaaagtctcaggacaaggcagactgcagacccaggggacgtgcgcggaccggggcttgtttcggtcctgggtgttctcagccttgatgtggacactagcggctctggtgcacttgctcggaggaagcagccacgtgtgggtgtcctggcctcagccggcagtaaccagcagacacacagcacggaaccctccaccctaccaggaagcccaggcaagaccccccagcagtgcatgctgaccccagaccctggcgacggatcggagctcctcggatttggagtggatccttacaaatcctgcacactagacagcagacacaggccctgccagagccagggacccgaatttttgtttggaaaaacactgaggtaagtgggggtggctcctgtccaggcagcccggccggtgggacagtggggagggtcggctccaagccctcctgagccctagagggggtgcgggacggggactcacaggagatgcaggacggcccgaacatagtaattcctggtaaagggcccgaacagcttcaccacggcggtcatgtacttctgtcccctgggggagggaggaaggcgagacggcgcggctgggcctctcccactcgggactcctttgctgccctgctgaccaccccagggcacccaggcctctttcctcccacaaaacacaccgggcaggcaccggccttggtttacccacaagcaccaaagggttggttccggagcctccaagtgagaaaccaagctccacccaaccctgtgagccctgcctgggccccgcagcccccggagagaccccagagcaggaggagactcaccagcgctccatggtggagcccttcttcctcttcccccgggggtactccagcaggcacacaaacacgcccgccacactgaagccatgtggttaaggaacagcccagctcagcctgaggggccacagggaactccctttactgaagacaacacagagaggggcccgagcacggtggctcatgcctggaatcccagcattttgggaggctgaggcgggaggatcactggagcccaggagtttgagaccagcctgggcaacatagtgagaccctcatctctacaaaaaatttaaaagccaggtgcagtggtgtgtgcctgtggtcccagctactccagaggctgaggtaagagggtggcctgagcccaggtggaggctgccatgagtcacagctgcaccactgcactgcagcctgggggacagagcgagaccctgtctcaaaaaaggtcgggggcagccactgcctgaggtcacagagccaggaggcagccacgggaggttccaacaggtctggcactcggggctgcccacgccctccctcccaccaccctgcccagtgctccttgtcgcaaggtccggctgggcggcagggctgagatggggcagaggaggtagaggggccggtcaagggggatgactgacaggagcgggcagaggggatcccagcagtccaacagggaggcctcagtgctggccctggccctctggtgacaccccctgcccaccactcaccaggacttagactggcgggtctgccgctgatcgccacatggtcctggcgaggggcctggctgctggggcctgggctgcccaacccgtgcacagcccaccctgtgtcccagcctggctgcggtggtggggagcggaggcaaacagctcactgtgaagtggctccccagctctgccctgggcgttccccgcccaccccagcctcaggtggaaggatacatggagtaggcaccaaagtaccactgggtgaagcgcccagctgtggccacgatgcccccggtgatgaggactgcggggagaagtgggtcaggcactgtggggctcccgtcccgggggcctgggccaccccccttctctacctactgtgggccaccaggccacccagagctgccccctacccatccccacagcacagtgacagggtcggggacacccccaggaggcacccctctgcactggtgaagagcagagcctgtggcgcacgggctggcggagggggtgctggacatgcccgggctctgggtcccaggagtggccaaggacagcccgacctgcaggccccagtgggctctgggacccccaaatggacccccttgtcaccatgagtctttgtttgatgcactgaaagctaacaggccgagtgtggtttctgcatcttcttgggggagtgtctttttccccccgatacggagttcctcttaacccgtcagcggttttgccttaatttcggtttcgtctgatatggctatttctgcacatttttgggggggtattgtccaatattcccccttactgttttttttttttttcgagacggagtcttgctctgtcacccaggctggagtgcagtggcgcgatctcgactcactgctacctccgcctccagggttcaagcaattctcctgcctcagcctcctgagtagctgggactacaggcgcccgccaccatgcccagctaatttttacatttttattagagacagggttttcaccacattggccaggctggtctcgaactcctgacctcagggaatccgcccgccttggcctcccagagtgttgggattacaggcatgagccacggcgcctggtccttcctactattttatttctttttttttttttttttggagacagagtcttgccctgtcacccaggctggagttccgtggcgtgatctcagctcactacaacctccacctcccaggttgaagcgattctcctgcctcagcctcccgagtagctgggactatgcgcgcctgccaccatacccggctaattttttgtatttttagtagagacggggtttcactgtgttagccaggatggtctcgatctcctgacctcgtgatccgcccgccttggcctcccaaagtgctaggattacaggtgtagccaccttgccctgccagccattctgtttttgtctccacatggtcttgttggaagatttcctatccttggtttgagcccagctacacattaactctctgggtttgtctgtctgcgtcggaggaggggagggcagtgtccttgagtctactcagccaattgtccatgcatctttggggaccgtcctggtcccgagcctgccatccgaaagagggtgcaaagctgccgctggtgccaccagggaggtctgaggacgtattctggcacccagccacatttacagagcacctgctgtgtacaggggggactctttgtcaaggccctgctgtctccgggccagctgcctcctggggctgcacggtctggaaggacctccccaggcaggtggcatttgaattgagaaataaatgagacagccatgaggctctgcagaagcagcagcttgtgccgaggccctggggcacgctcaggagatctaggaacagaaaggaagcacggcagctggaggagggggccggagagccgggaggccagggcgggcagtgcagggcgtccagtctggctctaactcttcgggccaggagcccctggagggtttcagcaggaggccagactagagcccaggtctcctggctcccagctgggtgccctcagtccgtctacttcctgtagggagtgcggggcaggcagggtgagtctcacggggcagctctggggagagctgtctgaactgacccaccgacttcttggccgctgactcgaagcaggcggtcactttcctgggcacaggacaggctgcagggccccgtcctccagccctcccaccctgaggtctctgctcccactccagctgccacgcaccctccagacaacagggagggcgctcagagccccaggggagtggtggcagcgggcccctcctcctcaccctcagcccccaggcccttcccaggcactcctcccccggtgcaggtccttcctggagctgctgcagtggtgcctctgccctcagacctcgcctgagcccagcctcacccgtgctgggccagacactccctggccctggtcccgagagggtccatttccaaatggagtccgctgccctcaccagaacctctgagcaaatgcacaggagggtgactgggggctgtgccatcccaccccaagagcaaagtgcctgtgcagctgggctgggcagggccgtcactgggtggtttcggcgccttgtgaaatctcagaccgcctccagcgcagactccagatgagaagggctgagccccagggcatgagcccattccccaccccaagcccagggagagcgacctccaggccagctggctaccgaggggcaggggagcttctcccgatgcccaggccggagcccccactcgggggcttcggggcggtgaccccggaaaccaccggggctgaaccgcctcttcccctgcgctgcaacttcctccttcgcggagtcgggggaccgagagaagggaatgggggaggggcgccgcgctccgcagggtctgcaagggaattactgggggtctcagaactcctccttccagcccgcggcctgagggtcccgcccccgttccccgcaccctcctggcctgaccccggcccggcctggcccgcctggcgccccacttccccaccctgtaagtagcccgaggtcccggctggggtcttgggacacccctccaggctgcagcctccaccgtccctgacgtgcactcactcaggccggacgccagcgcctgttcgttggcccacatggcccactcgatctgccccatggcgacacgaacccggctgggacactgctaggcgcgcactgccgcccctgcgctcccggccgaaccccgccccgcccaggccccgcccccagccccccaggtgaccgcggctgggcggagacccgcatctgtagggtgcagggctgtcccggagccttctgcccccgccctctctagccacgccgaggcataggaggggccctgcccggcagccccagcccaggcggggagttcctgcgcttccccagggcttcccaaacttcagctctcaaacactgacaagtgcccctgcccaatgctccggacccaaccgagggtcccgtgtcaaccaggcgtctattaatagcaggacaaggtgtgaaggtcggcttcctgagcaaatcggcctctccagagccttggggggtgggggagtcacccctacagcccgggaacacctctgcaccctgatgctaccaaggacaagggtggcctccccatggggaccagaggcccagcccccatttcctccccctggctctgggctggcacaggcgtggcctgggtcagacactgcagggggcctcccgtcaccaggtcactgaactgtgactgagactcgagggaggggacaggatgtgtacaactgggaaagcacagaatgcagggacggccccgtcacgtccggcctgggtacgggaggcaggggctggcgtgggggtggtgagcccagcgcccatgggaagactttagacctggggttgctcctgagggtcccacctgagccaatgtggggtttgaggggagcccctctgtggctctgcccagcctgcccctcccccaggccctcatggggcacacctggactccctgacaggtgccagggtcactcagagcaggaaccccgggatgctggtttacgaaacagaaaaacggcggaggccggaggcagcaatgctggtttattccccatggccaccggggccgcactggtgcccactcctgccaccattccagccacacccaggccgtgggcagccaccctccgagacacctgggccgggggcagggtctcagcagaagcgccgtgggcagccaccatccgaggcacttggtggtttcctgaggcccaaggaggctgctcccagcacggtgaccccttccctggtccgctggagggaccacctccccactgagctcctttctcagagaactgggcatagccagagctggggtgagaaagcccttcagccctgctgcaccgaggctctgccagttctcataccccctccccatcccatcttggcaaagcgctggtgcagcttagggcagctgaagcactcggcggggacctctcctgacacctgggcggccgcaggactccctgcactgccccacagcaagctgcccatgggcccggggtcaagccaccacccacatgtcccaggagtccggccagcccaccacatccgctccctagctccggcgaggccaccccttctccaagcggcatgcggtccctgctgaggcagtcaggcagctggcttcggcaggccgtcaggacccaggaggtgggcgcaggggtcatccag

SEQ ID NO: 140 - DNA, 81461 bp, Homo sapiens
  source 1..81461: mol_type = genomic DNA
agtctcagggatgaaggggagctatagctactcacccctggtgcaagacatacttctgctgtagttccagttccaagatgacagctccttctctggggggagcacagctagtggagtccaggcagctccttcagctgtgaggaaggactgtgcctgtaaggaatgcagggacctcagtggtgaagtcagtaggtgtctaatgtgttgatggaggttactgggatcctcttgctttctcttccttgctgtaggaagaagttcctcctgattcccagctgaccgtggttggaggatggggtggtggagtcctggtgtttccttccattttccatatggccttccctagtttctgcactcaccagggtttctgttactcctctcatgcactctggtgctctcccttagttattttcattaaaacatatagttgcccctcagtatatgtgggggatttgttccaggacccccatgtataccaaaatctacacatactcaagtcccacagtcagccctgtacccacattttcaaaaaattgacgcttgatgtacatgggtttcacatcctttgaatacagtattttttatcatgtttggttgaaaaatatctgtgtataagtggatccacacagttcaaacctgtgttgttcacaggtcaagtgtaattgtttattcattgttctttttgagggctgtgaactagggtcttctagttagccatcttgctgacattactctgagaaataaaaaattttttgacaatttctagctgcagcatagaaaccaagttctctaacatgacatgaaagacttccagtgatcctctgaccctgacatttacaaagatgatcctgttgcctcagcaaatatcagtcttctcacctccttgcttctgctcatactgacttcactgcctgaaatatacttctccctctcttaaactagactagctactcatcatttaaggcataagcaccaaggtttaataagattcaaacagttccttaaaataagagtgagatggattgagtcacagttacgcacaagttggtctgctggctcagagaagggaatctaatccacctggaaatctgcaagaatgatttcttaaagaatttaatctttaaatcatgatgtagtcttaactgagaagttaggcatttagggtggagaggaaaatcacttccttgacttcttaaaagactattgtcaatggttctgtgaccttatatgtaaatgctttccttacttgtaatatatctgggatggagagaactcattcagagccttatgatttctctcatctcttccaatatttattctccttttccagttagaggaaaactctgtttaatagaaagagaaaagtaacttatgagctgaggaactctgctctttgtcatccataaatattacaaaataattccagaagtataaatctgaacattcattggtatatttttattctgaatatagctacataaaattttgttgtcaacatttttttcaaatcttggtttatttgaggtttaatcatcctgaaactattctatggtttatccactctcttatattcaacctttgttacataatctttccattgttgttcatgttcttttaaaaatctgatgtttctctgcttcccagaagtcccaacttgtaatagtaagtggttgtgccagacacttgggtacaatggtaaataaaatatagcagagtgggtgacaagtaaatagacatagtaatatgaaacaaatgctacttattgtgttatggggttacatcggagttgtttgtgggtaggagcaaatcagaaaaggtttctcagaaaaggtaattgttaagatttcaggggccaaataaattgaactttttttttaaccaacttctatatctattaagaattagaatgaaaaagtaagagaaaatactagcaaaccaaaagggattatacacaatgaccaaataggatttatcccagaaatgcaaggttagtttagcatacgaaattatgaaaattaaacaatataatataccatgttaatagaatataaagaaaaaggcacatggtcatctcaatagatgcagaaaaagtatctggcaaaatccaacattctttcatgattaaaaaagagacactcaacaaattaggaaagatagaatcttcctctactaaaaaaaaaaaagccatcttcaaaaatcctgcagctaatgtcatagttggtagtgcaagactaaatgcttttctccctgagacctggaacaagacagggatattcactctcaacacttctattcaacattataatgaaggcttcagccgggcaataaggcaagaaaaaaaaaaaggcatccaaattagaaagaaaaaagcgaagccatttctatttgtaggatatatgttcttgtatatagaaaatccgaaggaacacacacacacacatacacacgccacactattagcactaataaatgagttcaacaaggttgcaggataaaagatcaataggcaaaaatcagttgtaatgaatgaactgtatggtatgtgaattacatctcaaaaacctgttataaaaatcaattgtatctctatacactagcaatgaacatttaaaaaatgaaattaagaaaacaattccatttacattagcatcaaaaagaacaaaatacttaggaataaattttacaaaagaagtacaagacttataaactgaaaactacaaaaaacacagttgaactgtattaaagaagctttaaataaatggcaagataactctggtcatggatcagaagatttaatattgctagatggcaatactcctcaaattgatagattcagtgcaatccctatcaaaatgtcagctaccttttgtgcagaaactaacaaaccaaatctgaaatttatatggaaatacaagggacccagaataaccaaagcaattttgataaagaacaatgtttaaggattcctgatttcaaaactgactaccaagctatagtaattgagactgtgtggtactggcctaagggtaaacatatagataaatgaaataggattgaaaatatgtaaataaacctttatatatatttcaattgatttttcaacaaagatgccaggacaattggatggggaaaaaaaatagtcttttcagcaaatggtactgggacaactggatatccacatgcaaaagaatgaagttggccgtgttccttataccatacactaaaaataataaaaaatggatcacagaaacaaatgtaggagttaaaactactcttagaagaaaatatagacttactatttaaacagataataaggggccttctcgttttagctgcaacatgaataatgcttgaaagtcaacattcctgtccttacaacaacaaaaaagctgaacaaactaaaaatcagcaacttattggatccatcagagaactgaggctgacaagtaaactactaccctgaaatctgaagagacagacgaatccagggagtcactgctgagatctgcttgtctgaggcagaagctgctagaatcataaactggtaggaacacttaaacagtgattttaacaaattgccagaggctgagtgcgcactagcttgaaagtgagaaactcctggtggccatagtcttgtctggagcttcatttttgtggactttatcttcaggaatcccaccaggttctcatagagccaagaaagacctcttagttgctctggaaaggggagaagaagagtaaacattgtgaaatacacccagagcattctccgtaacaagggcctactctcttagggtgttaactctaaaaggagaaaatcaataggttagagacaaatgaagcatttattcagaataggaattgcaacctgggtagtagtcagagaccataccacccaagaggagcaagaggccttacatttataggaatttattcagattacataagttgtttgtcagatttttcattggtttaccaaacaaagaaggctttaatcattagtagaatggtgcatttgcaacagctggcaaggaaaaattatatacagaatcccttaaagactgggatcagtttccttgtattgttgagagcacagatgtttgcaaaggaacttggttttcatagttcccttgttggtctcacagttcatcagcagttcaacatggagtaagtagcccaagatagagtcactcatgttaagcctggaactctgctaagttcacaaggtgaacagtctttaccagaaccttatcctattttcggggagggatatttctgcaactccagcctcctctagtcttcctgtctcactggagggttggaggaagaaaagctaagaaacacttattaaggtcatagcccaggaacacaggcccacttagactgagatttaaaaataagtttataggatacttcctctcccccataccttaccaccacaccaacatgactccagtataataacagtggtttacagctgataaagcagcaagaaagacagattctatctgataagtcgttctttggaaatcctaaagacaacaggagagacaaaaacaaatatcctagaggaattccaagcctttgatactagtggctacagcaaacattaaacagtccaattccttgtcagattaatataaaaccccatagtaaaggcctattaacttcagtttttgttacccactgtcctgtgaccaacaaaagattttaaagcattttaaaaggcaagaaaatacaaaagccatatgttatctttgctttcagttccccaaaatagaaaatggaagcaacactgttttttgtgctaattggatacatcatagattacccaccattcaaagtcactgtcactttttttccccttgactgctgatgttggcaaccatgatttttgctgctcacaataatggatcatccaggggagcatcactctgagtggacgggggtactgaagtgcaacttaagtgtgttgcaatctggagtgctaacaattcatctttgggcaggacacagtggctcacgcctgtaatcccagcactttgggaggctgaggcaggcagatcacctgaggtcaggagttcaagatcagcctggccaacatggtgaaaccctgtctctactaaaactacaaaaatcagctgggtgtagttccacatacctgtagtcccacctacttgggaaactgaggcaggagaattgcttgaacctgggaggcggaggttgcagtgagctgagatcatgccactgcactccaggctgggtgacagagacagactctctctcaaaaaaaaaaaattaatctttgactttacctgtgagttaactgttttgcttacattgagatagcactaacttaatttcagtgttgtgtatattgggatcatgtttcctaagagttcagacaatgaaaagagaatgagtataataccaatgccagcatggcccaaatgtcaccaaaaaagaaaaagaggaaagaaagaaagaaagagagagacagacagacagacagacagagaaggaaggaagggagggagggaggaaggaaggaaagaaagaaagaaagagatatatatggctattcttttaatgactcgtggaagaacatatacaactaggaagatacccaaaatagaacatcaccaaaaaagaaaaagagaaaaaaacaaaaagaaaaagaaagaaagaaagaaagatagatagatagatagatagatacatagatagatagatagatagatagatagatagatagatagggctattcttttaatgactggtggaagaacttatacaactaggaagatacccaaaatagaacatcaccaaaaaagaaaaagagggaagaaagaaagagaagaaagaaagagaaagaatgaaagaaagaaagaaagaaagaaagaaagaaagaaagaaagaaagaaagaaaaagggaagaaggaaggacatacatggctattcttttaatgactggcggaagaacatatacaactaggaagatacgcaaaatagagcatatgacaaaatatgcagaaaagaatttgggattgtgcattataaaggaaaggatgtgaaagcacatatgaagactgaatctcaggagtcctggaagagacaagcaagtacttctaaatcaattgaaagtgtttttatgacccaagaagataccaatgctcagttgaacataataactggtgaatttgcttgggcataccacccaaatgaatgcttatcacatcaacaaatgaatgcttatcacatcattcattcccttgattgcttgatgaaacaaagtaaaattacatttcctggttcaaaggttacgactaaaatatcccgtcggtcaacaaagggaaaattttgtaaaagatgtgttggcctcttaaagggtagagctcattttgtcagatcttaccaacaataatgttttctacagtgtatcaagtgatacactgaatcatggcaacaaaagaaaaaatccccatggcttttaggtactttgatttgaaaagtgaggtttcaaataatcttgatttctatgaatattttaatgaaaccaaagaaaacataaaaccaaatattgctagctaatattttgtccaaaaactaactagactttgctcatcaatctgcattattggcaatgaaaatgtaaattttggcatgtttcattcagtctgtgaacttcttatcaaagaaaatgaaaagatcttacccactaaatgtcttccatatgttgtactgtgaagggtatgatttgctagcctgtgacattgaggcttttataataaaagtttggggtcactttttaatttcctgaaaacatacagaagcactgaatgagacttctgactttatggaaatggaagaagatatcctccttagacatgtacctgagttatttgatattatatgtaggttgtgacaaagacgtgtatggtaaaaaatgacatttgggaagaaataagactgactcagaactcaaaaatatgtcaccagaaaggagcatacaagttaaacagtactaaaattataatttatttgtaatctatgctcagtttaagttcagattacctcagtgctttaaaaacattttccctgagaaagagaagtttaacttataatgacattcaatgtgctttagataatctatctataaacaggatattttagatatggagaccctacatgatgaatttatagatgcaaagggcctaaatgacaaacagttagtctaccaaaataggtctacagatacaaagtgagtggacagttttgaaaagctggaaaccaattcctacaagtctaaatacctgccgttgctaataagtaaagtctaaatacagtcatccctttgtatcatggaggattgtttccaggatctcctacagataccaaaatctgcatatgctcaagtcctgttgtaaaatggcatagtgtttgcatataacctatgcatatcctccagtatgctttaagtcatctctagattacttataatacctgatacaatgtgaatgctatgtaaaaagttgtaagactatattgtttagggaatgatgacaaggaaaaaagtctgcacgtgtttggtacagatgcatttttttcctaaatattttccatcctcagttggttaaatccacggatgtggagcccacacaaacaatgccaactgtattccatgctgaaaacatttttgttgacaggatatctaacttgatgtcattgcattggaatgataccaggagcagtgtaatgtgggcttgataagagcagatctgaaagtcaaagggaatttcgcatttaagtgagaatacactgtttaatcactacatcaaagaaagatatctcaaaggctgcaggcagttcagagaagtattattggaaaaagaaacaggaagagcaaaaatatcctactttatcatgggacactaagaaatatgtcattgttagtttttaataaatatttacattgatcttttaaaaggtcttatctataacctaagaatatacaataataatatgacatataaaacttaaatatccactaaagagctaaaatgtgtatcagaggagagaaacattataaaaaaattacttttctcacacatactattaatctgttctactattactactaattgccactgttaactagtcctgttgttgttttgcctaatcacctgtatgtaacagcaaagtaaataatatagaataataaaaatgttaaacacttttcatatttcattttaaaataatatgtgtatgtaattattatatgttagactattttttggtctggtatatctgtgtcctagattggctctaaaaatgttggttaccttagtgtacctgtcactgtctttcatagatcctaacatagataaattcagttctggaatgtttaacatttattagatagattaggtatttatattgtttgctgttctcttgaaacagtttaatttaaaggcttccaggggaaatatgtatgcatatattttgtgtgtctgaatgaaacaatggtaggttaattgaagataagctcaattaaactagccattaaatatatgaagtaattgtcaagaaagttaaaaattaagttttattgatttttaagacctaacttcagatattttatggtatattctcttttttagtgaaaatacctgaacgagccccttcttggcttctaaaaaaatatttgaggtaggagaactgtacttgatttcttctacctgactaccttacaccttttcctctgtcttataagattttgattttgaattaaagcaacaggtaaaagtgactttttggataaccattgctaatcagatgtctcctcatattctacatagtatctgtgactaggtcagttttatacacagtgccccacaagatgtgttttagcaggttctgggaagatttcgctatccccagactaccccaatagatgctttaaaatctagttagatatttatttctgtgcatttagcattgtattgtctgagtttctctttttttttttttttttttttttgagatggagtctcggtctgtcgcccaggctggagtgcagtggcatgatctcagctcactgcaagctccgcctcccaggttcacgccattctcctgcctcagcctcccgagtagctggaactacaggcacccgccaccatacctggctaatttttgtatttttagtagagatggggtttcaccgtgttaaccaggatggtctcgatctcccgacctcgtgatctgcctacctcaacctcccaaaatgctgggattacaggcgtgagccactgcacccgagtttctctttaaaaaaaaaaaaaacactggtggcataagataattatctagcactttagaatgaatgacaatcaaatgctttactatccattgcagcaactggagcactggtcatggggggataaaactaatactaaaaactggagaaagaagagaatgggaagtcaaatataacagacaaactttatagttttgtctaaaccagtaattattatatctctatcacccttggcaagtttccccttacttaggaataatataaacaactgtctggatggtggaataggtaaccataggtaagtatttgagaaccaactagatttgtacaacagagagaccatggtatatcctctcttccttcctggcttctcttctaagaactcagtttctgttaaataaaatgggttctgatgaaagatgtagactctcttgccccagaaatatagaaatttaggtaagagaccaacatgtaaagcatctttgggcctactttcacttggatctagaattggttattttaaactgacttaattttttaaaatgtattatttatcatgtcttatggaaagaaataaaatgatatatcaagacaaaagaaggtaatagaaaaagtactgcagttagaagatgtgaatgctacacccacctctgccccttactagttatgtgatcttgagcaaatagcttaacctctctgattccccttatgtaacatgggaataacattggccatcctgcctacatcatgagactgatcagagcaccaagtatgatagtgtattaaaagactttgcataccctgaggtgtaatatgcaaatataacatggctattacattactcttacatgagtagcttactgttgacaatgaaatcagaggacccaatttttttcatctcccaaagtatgactcagagtcatagcaaagaccaacacaaacattttttagaaatcagtgagaggccaatctaggaaaaaaattcccctcaagggaactgatttgtatggaaactgtttcaaagtgacatccctgcagtctcctatgggcaaacaaacttctacttggactgagaagacaaggataccaacagaaggttgttacttgtttttattgtttaagattttcatgcatacaaagatggttttcactatatcatcattaacatatcctatgaaacttggattatgggaactacttttgtaaaaggatgagattgatagctattttagtcctgtctgtgaaaaatacttgctttatttaatttgtatatgagttgaatatagaaggaaattatttcagtttaatatagccttaaaaaaaaaacttaattgctgtattcctaataccttcctgttacttgatgcctttcatcctcaccaccacccgccaagaaaataaaaagacattctggtcacttctgcttcctagacatggggttttcagttgaaaaccatcttttacttcatcactctttagagtggcccttaactaattgaagactaatatagttcatagtttctgtcttgggatatttctatactgaagtgcccaacagaagggcagaaaagattggcccagccttgattccatcatggttgatatggtttgcctgtgtccccacccaaatctcatcttcaattatagctcccataattcccacatgttgtgggagggattccatgagagataattgaatcatggaggcggcgtcccccatgctgtcctcatgatagtaaataagtctcacgagatccgttggttttataaggggtttccgctttcgctttgctctcattctctcttgcctgcttccatgtaagacgtgccttttgccttccaccatgatcgtgaggcctccctagccacatagaatcgtgattccattaaacctcttttcctttataaattacccagtctggagaatgtctttatcagcagcataaaaacagactaatacaatggtaattcatgttagtttaaattatagtaagtaaggctaaagtcaaattcaccgctccaaatctgtgattacttaaatattatctgctgagcttcaatggaacataaagtttcttcattaggtctaaaaattggactaccatggaaattatacttatattttcttctgtttctggaatgaattgacatttttagtttaccttccctaaagtgttttataaaaaacagtcattctattcattaattcttaaaaaatgttaataatatcaaagataataatatggaataattggccaataaaattttatactccattgacataatccaaagcattgaaacaatgcatctcaaaatatgcaccacacttactcatgttctcagtattatgtggctatgacaagccagtagaccatttcatgaaggcttaaattttcaccaagagtactttcagtatgagagaactttggtcctttctcttgtggttttttttttttcattgctctaatgcttggaaggttttaccccatctcccatctccagatcataaaatgatcatctatttggctcttaaatattcatataaaaattaaccctaacccttgtcttacaccatagcaaaaaaaaattaactcaaaatggatcatagatctaaatatctaagctaaaatcataaaaacttataggaaaaagcatgggagagaatctttatggtcttggaataagaaaagactcctcaaatagtactcataaacaccaattataaaagaaaaacttggtaaatgaacttcatcaaaatcattctctttaaaagacactgttaagaaaattaaaatgcatgggacatattggaaaaaaattaccaaatgtacaaccaataaaggccttgttttatacctatgtcatttcttctttgaacttggtaaacacaaacacaatactccggcagaatccactcttctacttagccagaccatccgcacctggaaataagtcatggcattccaggaatcatttctctttctttggaacgtgcttcacctgcctagattttctgcttatgttagctgtctataatcatttcttctaatgctcttggtggattctaaatattaatcactgcagcaaaaagaaatcaaattattgaagctgagtgataggtttaagagggagttccttatactagtctctctatattcgggaatatagaaaatgttttaagtgaagtccaaaaatatactctcacaactatcaataatctgttcttgaatcaaactctcacccatatgagttagagtatagaatatttccagtgtttctttattttcttaatatgcatgcttttttcttaggaaagatttttaaaaatcagcctacaggagttttatctgatccgtctgcactgtatttaacagaaaggccttcaagtttctgacatatggaaacccataatccctactgttttcttatggtagtcagtttcctctttttcacattctatctcagtaggagactgagaggggaataatagatatctgtagtcacatcatatctcactgaaagttggaatctggacaggtataaataagcagagtcaggcagattgagaatctacattagctcaattccaaatttaaggaatataggttacatttcagctcttgcaacctcatccacgtctctatcacattttctccattccttgtgttgtaattttcttcaactgcttcaactgctttatttttttttaatgtaaggatgttcatcatggtattattttatttttaaactttgaagtttggggtacatgtgcaggtaccccatataggtaaacttatataggtaaacttatgtcatggggtttgtacagattatttcatcaccccagtacccaatagatactttttctgatcctctccctcctcccacccttcaccctcaagtaggccccagtgtctgttgttcccctctttgtgtccctatgttctcataatttggctcccacttataagtgacaacatgtgatatttggttttctgttcctgtgctagtttgctaaggttaatggcctccacctccatccatgttcctgcataggacatgatctcattattttcatggctacatagtattccatggtgtatgtgtaccacattttctttattcagtccaccattgataggcatctaggttgattccatgtctttgctattattcacaatagcaatgaatagcgttgcagtgaacatacatatgcatgtatttttatgataaaatgatttatattgctttggatatatacccagtaatagaattaccaggttgagtggtaattctgtttttagctccttaaggaatcaccatactgctttctataatggttgaactaatctacactcccaccaacagtgtataagattcccttttttctgcaaccttgccggcatttgttattttttgactttttaataatagtcattctgactgctgtgagatggtatctcattgtggttttgatttgcatttctttaatgatcagtgatattgagctttatttcatatgccttttggccacatgtatgtcttcttttgaaaagtgttcatgtcctttgcccactttttaatggggctgtttggtttttttttttcttgtacatttgtttaagttctttatagatgctggatatttagacctttgtcagatgcaaatattttctccccactctgtaggttgcctgtttactctgttgatagtttcttttgctgtgcagaagctcttaagtttaattagatctcatttgtcaatttttgcttttgttgtgattgcttttggtgtccttgtcatgaaatttttgccagttcctatgtgcagaatagtattgcctaggttgtcttccagggtttttatagttttgggttttacattcaagtttttttttttttttttgagatggagtcttgctctttcacccaggctggagtgcagtggtgtaatcttggctcactgcaacctccacctcccagattcaagagattctcttgcctcagcctccccagtcgctgggattacaggtgcccaccaccacgtctggctaatttttgcatttttagtagggatggggtttcaccatgttggccaggctggtcttgaactcctgacctcaggtgatccgcctgcctcggtctcccaaagtgctgggattacaggcataggccactgcgcccaacctacattcaagtttttaatccatcttgagttgatttttgtatatggtgtaaggtaggggtgcagtttcaatcttctgcatatggctagccagttatcccagcacctgttattgaatagggaatctttccccattgcttgtttttgtcagatttgtagaagatcagatggttgtagatgtgcagccttatttctgggctctctatttggttccattggtctatgtgtctgtttttgtacagtaccatgctgttttggttactatagccctataatatagtttgaagtcaggtaacgtgatgcctccagctttgttctttttgcttaggattgcctttgctatttgggcttttgtttgtttgtttgtttccatatgatttttacaataattttttctggttctgtgaagaatgtcattggtagtttgataggaatagcattgaatctgtaaattgctttggacaatatgaccattttaatgacattgattcttctgacccatgagcatggaatgttccatttgtttatgtcacttctgatttctttgagcagtgttttgtaattttcattgtagagatctttcacctccctagttaccaatattcctaggcattttattcttcttgtggctattatgaatgggattgtgttcctgatttggctctcggttaggctgttgttggtatataggaatgccagtgatttttgtacattgattttgtatcctgaaacttcctgaagttgtttgtcagctgaaggagcttttgggccaagactgaggttttctagaatcatgttgtctgcaaacaggcatagtctgaattccgctcttcctatttggatgctctttatttctttatcttggctgattgctctggccaggtcttccaatattatgttgaatagaaaggtgagagagggcatccttgtcttgtgccagtatttaaggggaatgcttccagcttttgcccacagtacgatgttggctgtgggcatgtcatagatatttttaggtatgttccttcaatactagtttattgagagtttttaacatggaggaatgttgaattttatcaaaagccttttctgcatctattgagaaaatcacgtggttttgtctttagttctgtttatgtgatgaatcacatttcttgatttgcatatgttgaaccaaacttgcatcccaggaataaagcctacttgatcatggtggattagctttttgatgtgctgctggatttggtttgcaagtattttgttgaggatttttgcatcaatgttcaccaaggatattggcctgaagttttcttttattgttgtggctctgccaggttttggtatcaggataatgctggcttcatagaatgagttggggaggagtccctcctcctcagctttttgaaatagtttcagtaggaatggtaccagctcgtctttgtacatctgattgaattcagctgtgaatctgttttgtcctgggatttttttggatgataagctatttattactgattctatttcagaggtcactattgaactgttcagggaatcgatttcttcctggttcagtcttgggagggtgtatatatccaggaatttatccatctcttctaggttttctagtttgtgtgcatagacatgttcatagtagtctctgattattgttttactgtggggttagtggtaacatcccctttgtcattccttattgtgattctttggatcttctctcttttcttctttattagtctagctaccaacctatctatattattgatttttttttcaaaaagccaactcctggattaatcgatattttcaatggctttttcatgtctcagtctcctccacttcagctctgacttgggttgtttcatgtcttctgccagctttgaaggaggtttgctcctgcttctctagttattttagttgtgaggttaggttgttaatttgagatcttcctaactttctgatatgggcatttagtgatataaatttctctcttaacactgccttagctatgtcccagagattctggtatgttatatctttgttctcattaattaaaaagagcttcttgatttctgccttaacttcattatttacccgaaagtcattcaggagcatgttgtttagtttccctgtaattgcatggttttgagcaaattttttaaatcttgatttctatttttattgtgctgtgatctaggagtgtgttggttatgatttcagttcttttgcatttcctgagaattgttttatgtctgattgtgtagtcaattttagagtatgtaccatatggcaatgagaagaatgtatattctgttgatttaggatggagagttctgtagatgtctatcagatctatttggtccaatgttggattcacatcctgaatatctttgtgaattttctgccttggtgatctaatactgttagtggagtattgaagtctcccactattttgtgtgggaatctaagtctttttgtaggtctctaggaacttgctttatgaatctgggtgctcctgtgttgggtacatatatatttagaatacttaggtcttcttgttgaattgagccctgattaccattatgtaatgtctttatcttttttttttatctttgttgatttaaagtcttggtggtctgaaattaggattgcaacccctgcttttttctgatttccatttacttggtagattcttctccatccctttattttgagcctatgggtgtcactgcatgtgagatgggtctctagaagatagcataccattagattttgctgtttttttccagcttgccactctgtaccttttaaatgggggcatttagcccatttacattcaaggttagtattgatatgtgtggatttgatcctgtcattgtgttgttagctgtttattatgctggctggcttgtgtgattgctttatagtgtcactggtctacgtacttaagtgttttggctggtattggtctttcctttccatatttagtgctcctttcaagatctcttataaggtgggtctggtggtaatgaactccctcagcattggcttatctaaaatggatcttatttctccttcactgaggaagcttagtttgactggatgtggaattctgggttcaaaatttttttctttaagaatattgaatataggcccccaatctcttctggcttgtagggtttctgctgagaagtcagctgatggggttccctttgtaggtgacctgccctttctctctacctgcctttaatagtctttcatttctaccttggaaaatctgatgtttatgtgtcttgggaatgatcttcttgtatagaatcttgcaggggtttcctgtattttctggatttgactgatggcctctctagcaaagttggggaagttttcatggacaatatcctgaaatgttttgctttttccctgtccctttcagggatgcaaatgattcataaatttggcctctttacataatccatgtttctcagaggttttgttcattcctttttattcttagttctctttatttttatctggctgtcttaattcagagaaccagtcttcaagctccaagattctttcctcagcttggtctattctgctgttaatacttagggttgtgttgtgaaattcttgtagtgtgttttatagctctataagatcagttaggttcttttttatactgcctattttgtttgtcagctcctgtatccattttattgtgattcttagtttccttggattgggttttgccattctcctgaattttgatgatctttcctatccatattctgaattctatttctgtcatttcaaccaactcaggttaagaaccctggttggagaactgatgcagtcatttgaaggacataagacacttgggccatcgaactgccagaattctctctagggcctggaggcagcacgggtgagggctgcaagagagcaaagatgacaacccacctctcccactgagagctctgtcccaggcagttgtagagctgctattggctcgatagccccagcaaggagtggctgaagactcagactgggaggacatgcctagtgaagagatacaggatgggggcccacataacaaacagtctgcccgctttctgtatggctgctgcagtatgctgggggtctgctccagtcccttgtcacctcggatttttcagcacctgaaggtaccaacaatgaaggtcgtgaaacagcaaagatggtggcccacccctccctctgggagctctgtcccagggaagtttgaaactgttgctgacagaaaacactagcaggggtatctgtagaccttggtcaggaaattcctcccagtgaagagaaatgggatccagtgcctgtgtgaaaaagcagtctgaccacttttatggagagctgctgtgctgcgccaggggaccactccaatccctaatcacctcagactgtctagagcctgaaggcaaacatggctaaggctgtgaaatagcaaagacggtggcccatcctttctcgtggaagctctataccagggaggctctgaaccactgccagctggaaaacaccagtaagggtgactggtgaccctggttgagaagttctgcccattgaggagaagcagcatcaaagacccatgtgaaaaagtagtctagcttcttttctgtagggtggctgcaccaaaggcaacaatggctagggctgcaaaacagcaaagatagtggttcaccctccctctgggagctctgtctcagggaggtgtaacactgctactagtggctggctggagttccaagccagtccctctgggagctctgtctcagggaggtacaacactgctaccactggctggctggagttccaagccagtgggtcttatcctgagatgtgctgtggcagcaggatctgcagacggtcactgctcagccccctggattcagcccctttcctaggggtatgtacagaggtctaacttcccactttgctggagttgcagccacttttgctgggaaacccgagtatctaaagctcctggggctctgtatatgcctgagtagctgctctgccaagactccatgtatcaataaccctatgtgtcagactgcaggaattggtggagtgggttcatgagaagacctcctgacctgggagctgcaaagatctgtgggagaagcgtgggtccccatcatcactcactgactcaccccttccttgggcaggggaggctctcctggctctgtgtcgctcctgggtgggcagctgtctgccttgcttttctctgttctccatgggtcaagttgttttctttatgaatccaatgtgtgtacctggatatttcagttgaaggtgttgtgttcactcactccttcagtttctctccatgagagcgacaaatgcaagctccatctagccagcctcccaaccactttcttaacaatgtccttaaaactcgttttgcctccttatcctttgactaagccaatgctgaacaactgcaattctggatgaatctaactatccatctctgcccctatcttagattacagagccctgctggagaaaaattacattaccaaatggcattatacattcttgtttgcataatttatatatacatatacttgatcagctacctcttccattctccaaagtaactattctaaactttttcctctctctctcctacctaacatctcccctttaccctcagtagatgacctaacttcttacttcacatataaaacagaaacaaaaaccagagaggccatcaataaattaactcatctcaaacatccttccttcttgtttcaaagaaataaatatccctctgtttaaggttaattcattcagcagtgctctagatcccatgtccatcaatttccttagtgacataactctaattactgccgtcttactcaccttcctcaaaatatagccaacattcattaccttcacttcctcacttgtatacttctcaacctactgcttgagaatgtttctactgttgccataccatgaaatggttatttacaaagccatactaacttctctactggtgattattttcagggcctttaaactatttcccttgattcattgagctatttcacaatagctattgtgcatcccatgtctcagtcagtgtactgccatcatccagttatctaagtaataaacccaagacttatcctaatgttgtacacgtctgttttttggtctttaataacatttcacaatagctattgtgaaatagctcaatgaatatctgagtgtcatatctgtgacactactctctcctggttttactcctgtttctctagccattcatgaaacgtgttgaaatatgtgaagaggagcccatgtaggacatcacctctgcctaaattttaagtgggctgttttacagtagtccatcctttggtctttctcaccacatactttatttctgagcactctcatctctacctgcagcttcaaccagcaactgacaaccatcatattttttaatcttcagtctaagcctctcctgaatttcatattcctctgcctactggatatcgccatctgtttttccgcacaggcacttctattcaatgtgtccacttccgatctctttctcctgcatcccatgtctcagtcagtgtactgccatcatccagttatctaagtaataaacccaagacttatcctaatgttgtacacttctgttttttggtctttaataacatgaagctctatccattctacctctaaagattctcttgaatctgctctcttcatcctaatgctaccgctaattcagaccctcattttgcctcccttgaataactgcattagcctcctaatttgtctccctgccttgtgtttcacttttcttcaaccttttgttttcctgggtcccagtgtgatctttcaaaaatgcaaacctgattttcttgcgtaaaatcttcaatgtccccctgtttcattcaaaacacatttatttagcatctgtcagtcatgaattattcccatctcagaggatctcaaaagtgttattgcaaacaagtcctctagttttgaaccatgtcttcatacctacctgatatcccaattattctacaccacacttgtgatttcctgaatgtgccatgttagtcccacatcctagatgactgtccttttttacttggctgacttgtgttcattcatttaccccataccctttgcccccatctataagtatggctataagtatatgtatgtagtgagtgccctggtttatctctataggagtatattctaatagatactttactttttgctctctagtcctgattcttaacatattgaaggcagggactgtgtttttcacatctatttaccaaacaaaaatagtgccagatacataataagcattcactgaatgtttatttttatttttttgagatggagtattgattgctctgtcacacaggctggagtgcagtgatgcgatcttggctcactgcaacctccgcctcctgggttcaagcaattcctctgcctcagcctcctgagtagctgggattacagaactcgccaccatgccgacttaatttttgtatttttagtagagacagggtttcaccctgttggccaggctagtctcgaattcctaacctcaagtgatccatctgcctcagcctcctaaagtgctgagattacaagcatgagctaccacacccggcctacattcagtgaatgtttattgagtggcctaagaatggcttatcaagaaactgtaaataagttcatttcatttgccaatattgccagatattgtaatcatacattatctttcagatctagcttaaagcaatgtgtgctttatttatctttttattttccttttaagaatagataatttctttacaaaaaaacttattgtagaaattttcaaacataaacaaaagtagaaatagaataatgagtccactgatacccatcacccatcctcatcagcatcctgctactcttgtttcatctgttttcccactacttttttcctagaatattttaaaataaattctataaattatattattttgcctataaacagtttagtgtatatcactagataaacagttattaacaaagcacagtgtatttcttgcttttattctaaatgtattctactttctcttatgctgtctacggaccaatttaagcatgacaattataaattataggacatttttttaaatgtctgactactagtcttccttcaggctttactcagggttccacccacttcccaagtatgtagactctaaattgtgataaaatacacataacaaaatttaccatcaactaattttaagtgtacaattcagtagtgttaagtacagtcgcattgtggtgcaatctccagaactcctttttctcttttaaaattgaaactttatgcctattcctctgcaattctccctccccccagcacctggaaaccatccttctacttttgtgtctatgaatttgactgctctagtcaaatagaattctagtcaatggaatattctagtcaaattaggaagtggagtcaaatatttggatgacaaatgtgatatttgtctttttgtgtctggcttattttattttgtataatggtctcaaggtttatcagtattgtagcatttgtcagtatttccttcctttttaagactaaataatattccattgtatgaatatacctcattttgttaatccattcatcaatgaacacgtgtgttgcttacactgttggctattatgaataatgctactataaatatgaatgtatctatgtctctttgggaccctgctttcaatgcttttgggcatataaccagaagtggaattgctgggtcatatggtaatcctatttttaattattgaggaaccatcatattgttttccacaatgttgtaccattttacattcttattaataatgtgtgaaggttccaatttttctaaatccttgccagcacttgttattttctggaggttttttttgatagcagccatcctaatatggggtgagataaacattttttaaaatgttattatattccagtgtctccattaacaaaacaataattcctttgtatcatctaataaagaagggatttctaacatgctcttcccagtctcccccatgtccttatactgccatttcctcaaactagaagctttggagccaccactgattcctctcttattctctcatctcacatccaattctttagaaaatccacatatgtacccagaatactcccaccccacttctcacccttctagccatttccaccaccctggtccaagctaccgccatctctcctggattgtttctgaagccttccaagagatctccctgtttgttcactcttgcctctcttcaatctgttctcaacttgacaaccagcacaatcttgtccaaacaaatctcagactgacactcctctgctcaatgccttccagtgattttccatctcacactcagtaaaaatcaaagtccttctactggctttgaggcccaacatgagctgagtccatgttacctacctaaatttaccccttataactttcccttttgttcattctactccacccactgatgcattcttggtgttcttgaacacactactattctcctacctcagtaagggcctttgtctcgaattatctttcccctgaaacctgctcgatttacttcctaacttccatgagatgtcagcttcataaggaggctttttcttaacacctttttaaaaatggaaatcaacccctcaagaattctctactcccctccgcagctttactttatcccgtaaactttatcattatctaacataatatatattttatttgtttattttctgcccactgtcattaaagtacaagcttcagatgggcaaggaattttagataaaatccttggcatataataatgcccaataagtaattgtgaatagagttcatatctctgtacatatttttgtggttgctccccagatctgcaccacaacttaaaaagcaaaataaaagaatgcatatctttccaaagcaagaagactggcataaattggacagatgatgaaaaaagaagctacaaggataaaggaatagttcaaactcaagaaatattgcagtatttgctccccatcgtgcatagcactaaaaacatgcaaaccactcagataaaacagctattcaatccaagaaccaacttccaaatccaacatcagtaagtcaatacaattttatcactcttatctatttaacacatcttttttaaaaaagcagggcttattaatttattatcctacgaaaaaaaaatctgctcttgaaaatgatgtcagctccatcacatttggcaaagaacaaagacccaaagctgtcagaaaacactggataaatgaaggagtaagttatcaggccttatttaattgattatttgcatgaaactactcattaatttagatctattaataaagtaggcataaataaagtatgattatagcctgatttgaaaattatcagctgttttaagccttataatcctatggggtaaccagaattaaaaataattaacctgagctacttcagtttattgatactgagatgaaagcagaaagagcgagaccagttttcttctaaagataaaaaacagaactacctctaaggccaaaaggaaacatgtgtaaataaaagtaaagacagtaataagctgaaaataataaatacaatactaatattatcaacagatttttataatgtacttcctatgtgctacacaccgttctaagttatatatgtatacactttacattttacacatgagaaaactgaggtgcaaagaggttaaataatttgtccaaagcctcacaagccaatatgtagtggaatctggagtcaaatccacctagacattctgactacagagtcctcctgaacttcatcattatgctttgccatttctctttataagtgaaaaacatgaccaatatacttaatatacaaagagtgcttacatatcaactggaaacttatgaatactttcataagaaaatgggtgaaggctatgaaccattgctactgtgcagtagtaaaaaccctgactcttcactaggcctcctctgacaccagcccaatggggagagaaagaggtacttcatttctgtccattgagtatggaaatctcggctccccatttggtttccaatgacaccctgggggaggagagagactctttataggccagtgggagggtcaaagttctggcttctatttgttcttctttgactccaccctagcagaggtttgagatcccccattatacctcataagagtggaagtgtaagcccctctgcctctgcttacatgggtgggagtgagggcactgtttatctgtggtgcttggctggagtacagtggttattgcctaacattttctatatcagtaggctgtccctttcctggtccttttctacacagtacaggctattgttgagagctttttgtgcatgtgtctgggcacatttgtgttttcagattgctggcttcttcagctccaagtcttggatatatgaggcaaaaagaaaacccaggagacaccattgtgttgttcctttgttcttgaagtccttagctagcctgcctgctttctacctttcggagttgccttttgttcattttatatgtaatgtccaggatttgtagttatttttagtgcaaagaatagggaaaatgcatctgcttcatcttcatggaagtgaaaaatatctccaattatattttgatttgcataatctttctcaagaattttcatcattaccaaatggaatgccaagcatgagatttattcctccatattgaaatctgacctatgtttgaccagagagaaatttaaggtatgtaaatcatcttgttaacatgcaattcacctattaatccacctagaccctattcattttggcttaagaacagaacagacaatgtaggtttcagccctatgattacattcagatgtaacgtcatgttcaacatgataattctgcaaactcttacagcacattaactagtttctccttaatcctaaattagaccaatgtctaaaatggtttagcaaagtgtgatcttctcattctttgcttattctcactttaccctgaaatcacttactataggtaatagcatgtaagagtgttgagacagtcaaacaaatgatatataaaacagagaaggtagccataaagaactaagttgtaagaaaaacaacaacaacaaaaatcaacctgacaatgtttaagtttgcagtgagatcatctgttaagaaaggatttgcttgctgctttcctactttttaatatttccatatacacctatatcagatacttttgggggtgtctacctcaggcacaatttgcccttctctggggactgcctcttgatccacaagggtagcacttccaaaagctgcatttgtaattatgtgacctctacccactggcatggttgccaatcagattatctttctctatactttggaattggaatgagagatagtggatcagtcttgcacatgaaactgctgtaggatgcaaatttgagctaagggaagtaaaaactttcctgtggagagagaaaagcagagactgcagatgaataaaaacccttggatgttttccattttctagttctagtcctttcctgaagcctggctgaattccctctccctctgtttccatgagtagctttgtactttcttataattcttcccctaccctaccttatgctttttttaattaagctagcttgaattggtttctgttacttgtaaccaaagaggtcttagttaatacctcactatttgtctgtaccttcatgctcaggccaatcctcattgagtgcatttctagattcaaagtattaatatataaggaacctcttatgaaagtaatgactaaaaatcacgccatgtcctaattgtcacctagaccccaccccaatctcaatggaggctacatatggagatgaacctccacatctgtccaataataattagaagcctcctatctctggtgtcaatggggtccagatggggaacctggacttccacttccatcttgcagtaatgaggtcttatctccccactccctgagctggagcaaactaacaaaaagccaaaacagagggtttacataagatccagagtctcataacataatatgaaagtgtctatgttttaatcagaaataaattcttgtaccaagaaccaggaagatctaaaactgaaaaaagacaattagtagacacaaacactgagatgttaatgatgttagaattttttgacaaagatttttaaagtaatcataattaaaatgcttcaaaaaacacttataaacacacttggaagaaataaaaaaatagcctcagcagagagagagagaaaaaaatattaagaaccaaatagaaatttttgaattgaaaaataccactgaaattttaaaagcttaatggctgagcagaacagtataattgtacaaatagaggaaagagtcagtgaattgagagagatagaaaaatagaaattacccaactgaacataagagaaaaaataggcttaaaataaaatgaatagagctgcaggcacctgtaggactataagacaaaatctaataatattcacatatcgtagtttcagaaggacaggagaatgaatatagggctgaaaaagaaatcaaagaaataatggctgaaaggttcccaaatttgacaggagacataaacctatagatcaaaaagctgagcagaccattaataggatacacccaaagaaattcatgccaagataccccaaaatttaaatttttttttttttgagacaaagtcttgctcagttacccaggctggagtccagtggaacaatcttagctcactgaaacctccgcctcctgggttcaagtgattctcgtgcctcagccttccgagtagctggggttataggcacccaccaccatgcctggcccaatttttgtatttttagtagagacgaggttttgctgtgttggccatgctggtctcgaactcctgacctcaagtgatctgactccctcagctcccaaagtgctgggattacaggcatgagccaccatgcccattccccaaaatttaacttctgaaaatgagaccaaaaaaaaaagaaaaaactatcgaaaggagtcagagaggctgggcacagtggctcatgcctgtaatcccagcactttgggaggccgaggtgggcagatcacgagttcaggagatcaagaccaacctggctaacacggtgaaaccccgtctctactaaaaatacaaaaaattagctgggcgtggcagcgggtgcctgtagttccagctactctggaggctgaggcaggagaatggcatgaacctgggaggcagagcttgcagtgagccaagatcgtgccactgcactccagcctgggtgacagagcgagactccgtctcaaaaaataaaaaaagaaaaagaaaggagtcagagaaaaatgacacctttcctacagaggaaaaacaatttgaatgacagtggatttctcatcaaaacccacaaagcacaataattttaattattggaagaaattgtcaacttagaatcctatacccagtgaaaataagggagaagtcaagaaaggttcagataaaagaaaatgaagagaatttttcaccagaagacttactctaaaagaatgactaaaggaatttttctaaacagatagaaaatgacaaaagaaggaatatcaggaaagaaagaatacggtaagcaaaaatacaggtagatataaaatacacgtaaatataaatttttctaaatcatatttgatggttgaagcaaaaattataatattgatgtggttccaaatatacataaaagacatatttaagaccactataaatgtgagaaggtaaaaggacataaaaggaggtaaggtttgtacttcactcaaattactaagttaacacaaccaataaattgtgataagttatgcatatgtagtataatacagcaaccactgaaaaagctgttcaaagagatatactaaaaaacactaaataaatcaaaatggaattcttgaaaaatgttcacattacccacaggaaggcaggaaagagaaaacaaaaaacaaaagataaactttttttaaatggcagatttaagtcctaagacatcaactattacattaaatgtaaatgacctaaatacaacagttaaggacagattaacagaatgaattttaaaacattacccaacaatatgcagtcacaagaaactcatttcaaatatgacaatggaggcaggctgaaagtaaaaggatggaagaagatacatcatgcaaacattaatagatgaaagcagaagtggctatgttaatattaggtaaagtagattttagaggaaagaaaattatcaaagaggggcattatatataatgtttaaaaggtcaatccactagaaacacagcaatcttagatgtgtgtataaaatcacagaactggctgggtgcagtggcttacacctgtaatcccagcaccttgggaggccgaggcaggtggattacctgaggtcgggagtttgagaccagcctgaccaacacagagaaaccctgtctccactaaaaatacaaaaaattagccgggtgtggtgtctcatacctgtaatcccagctactcgggaggctgaggcaggagaatcacttgaacccgggaggtggaggttgcggtgagccaagatggtgccattgcactccagcctgggcaacaaaaacaaaactccgtctcaaaaaacaaaacaaaacaacacagaactgcaaaatatgtgaagcaaaaactgataaaacagaaaggagaaatagacaaattcacaattgtttcaataattagaaaataagcaaggatataaaataattcaacaagaatataaatatctaactgacatttaaggagcacttcatccaacaacagcacagtacacattattttcaagtgtacgtggatcatataccaagatagaacatatcctagctatgaaataaacctcaacatatttaaaagaatttaaatcatagaaagtgtatatctgaccacaatggaatccaactagaaatcaatagccaaagggtaataggaaaaaaaaaaaaaaacctaaacatttggaaactaaataacacacttctgaataaatcgtgagtcaaaaatattctctgggatggggccaagatggctgactagaaacagcggcattcggaggctcccattgaaaagaactataataagcaaggtatccaggttctctcatcagaactgactaggaggctggtgtgatccacagagaggaagaacagtgtagtgcagtggcccacctgagagccacacagggcaggagagcacccccctatatccccagccaagggaggtggtgagtgagtgtgctacccagccggggaaaccgtgctttttccacagaactgtgaaacctatagattggaagatcccactcacgacccacgccaccagggcctagcgtcccaaccccagagccgtgaagtttctcaatagcctcttagctggaatctgcttaagcctacagagctccccaggggaggcatgaccagcaccacagctgtgtctgcctgctgtctaagccgtttgagttccttgggggaggggcagcagccagcactgggactcacaactgcctaacacactaagctccctgggtggtggaagggcatcatccatctctatagctccaggctgtgcttttcctctgctggagtcagggaggctgaacagcttggttccaagacatgttccccaaagcccaacacactgactgtggctgactgtggccagagtgcctcttcaggcctgaccctgacccatccttcctcattgggtggggctttcctgcaggaacttcaataactccagccagaggctcagggacagaacccagatctccctgggcctgagcccctagcgggaggggtgaccacagtctttgcagaccagcagacttagcctttcctcctggtagttctgaggaatctgggcagcccagacaagtgggtttccccccagcgaagcacacccccccaaccaagggacaaagtgcttcgttaaatgggtcctgttccccctgccacccaactgggtaagaccctccaacaggggttgtcagataccctatacgtgagcaatactgctggcatcaggctggtaccccttgaggtcagagatcccagaagaaggagcaggcacccttctttgctattctccagcctccttgagtgacatctccaggcccaggagtgaaccagatgacgagggcctgaagtgaaaccccagcaaacagcagcagccctatagaaaagggacctgaccaatgaaagaaaaacaaatagaaagcaacaacaacagtatcaacaacaacaaacaagcccccagaaaaaccccatccaaggatcagcgcctcaaagatcaaaactagacaaactcatgaagatgggaaagaattaatgaaaaaacactgaaaacccaaaaggccagagtgcctcctctcctccaaatgatcgcaatgtatctccagcaatggcacagaattggttggaggatgagacagacaaattgacagaagtaggcttcagaagatgagtaataaaaaacggctctgagctaaaggagcatgttctaacctaatgcaaagaagctaagaacgttgataaaaggttagagtagctgctaactagaataaccagtttagagaggaacataaatgacctggtggagctgaaaaacagcacaagaaccttgtgaagcatacacaagtatcaatagccgaatcgaccacgcagaagaaaggatatcagagtttgaagacaaccttgctgaaataaggcatgcagacaagactagagaaaaaagaataaaaaggaatcaacaaagcctccaagaaatgtgggacttcataaaaagactaaacctacgattgatcagagtacctgagggagacggagaatggaaacaagttggaaaacacgctttatgatattatccaggagaacttctccaacctcgcaagacaggccaatatgcaaattcaggaaatacagagaacatcactaagatattccatgagaagatcaaccccaagacacataatcttcagattctctaaggtcaaaatgaaggaaaaaatgttaagggcagccagagagaaaggccaggtcatctacaaagggaagcccatcagactaacagcggccctctcagcagaaactctacaagccagaaaagattgggagtcaatattcaacattcttagagaaaaaaaatttcaacccagaatttcatatgtggccaaactaatcttcataagcaaaggataaatcaaatcctttccagacaagcaaatactgaggggtttcattaccaccatggctgccttgcaagagctcctgaaagaagcactaaatatgaaaaacaaaaaccagtaccagccactgcaaaaccacaccaaaatataaagaccaatgacactatgaagaaactgcatcaattagtgcacaaaataaccaaatagcatcatgatgacaggatcaaattgacacattacaatactaaccttaaatgtaaatgggctaaatgccccagttaaaagacacagactggcaaattggataaagagtcaagtcccattggtgtgctgcatccaggagacctgtcttatgtgcaaagacacacataggctcaaaataaagggatggagaaaaatttaccaagcaaatggaaagcaaaaaaaaaaaaagtaggggttgcaatcctagtctctgacaaaatagactttaaaccaacaaaatcaaaaaagacaaagaagggtattacataatggtaaagggaacaattcaacaagaagagctaactgttctaaatatatatgcacccaatacaggagcacccagattcataaaacaagttcttagagacccaaaaagagacagactcccacacaataatagtggaagactttaacaccccactgtcaatattagacagatcaacaagacagaaaattaacaaggatattcaggacttgaactctcagctctggatcaagtggatctaatagacatctacagaaatctccaccccaaatcaacagaatatacgttcttctctgtgccacatggcacttattctaaaactgaccacataattggaagtaaaacagtcctcaacaaatgcaaaagaactgaaatcatagcaaacagtctctcagaccacagtgcaatcaaattacaactcaggattaaaaaactcactcaaaaccacacgattacatggaaattgaacaatctgctcctgaatgactcctcggtaaataatgaaattaaagcagaaatcaagaagttctttgaaaccaatgagaacaaagagacaatgtaccacaatctctgggacacagctaaagcattgtgttaagggggaaatttatggcactaaacacccacatcagaaagcgagaaagatctcaaatccacacccaaatatcacaattaaaagagctagagaggcaagagcaaactaatccaaaagctagcagaagacaagaaataactaagattagagcagaattgaaggagatagagacacaaaaaactcccccaaaaatcactgactccagcagctgtttttttaaaaaaattaacaaaatagaccactggctagacaaataaagaagaaaagagagaaaaatcaaatagacacaataaaaatgataaggggatatcaccactgatcccacagaaatataaactaccatcagagaatactatcaacaccttgatgcaaataaactagaaaatctagaagaaatggagaaattcctggacacacacaccctcccaagactaaaccaagaagtcggatccctgaatagaccaatagcaagttctgaaattgaggcaataattaatagcctaccaagcaaaaaaaagctcagaaccagacggattcacggctgaattttaccagaagtacaaagaagagctggtaccattccttctgaaactactccaaacaattgaaaaggagggactcctccctaactcaatttatgaagccaccatcatcctgataccaaaaccaggaagagacacaacaaaaaaaagaaaacttcagaccaatattcctgatgaacatcaatacgaaaatcctcaataaaatactggcaaaccgaatccagcagcatatcaaaaaacgtatccaccatgatgaagttggcttcatccctgggatgcaaggctggttcaacatatgcaaatcaataaacataatccatcacataaacagaaccaaagacaaaaaccacataattatctcaatagatgcaaaaaagagttttgataaaattcaacatcccttcatgttaaaaactctcaataaactaggtattgatggaacatatctcaaaataatgagagctatttatgacaatatatagccaatatcatattgaataggcaaaagctggacacattccctttgaaaaccagtacaagacaaggatgccctctctcaccacccctgttcaacatagtattggaagctctggccagggcaatcaggcaagagaaagaagtaaagggaattcaaacaggaagagaggaagtcaaatggtctctgtttgcagatgacatgattttatatttagaaaaccccaacatctcagccccaaaactccttaactgataagcaacttcagcaaagtctcagaatacagaatcaatgtgcaaaaatcacaagcattcctttacaccaacatagataagcagagagccaaatcataaatgaactcccattcacgattgctacaaagagaataaaacacctaggaatacagctaacaagggatgtgaaggacctcttcaaggagaactacagaccaccaaggaaacaagagaggatacaaacaagcggaaaaacattccatcctcgtggataggaagaatcaatatcatgaaaatggcagtactgcccaaagtaatttatagattcaacacttttcccatcaaactaccactgacattcttcacagatttagaaaaaactactttaaatttcatatggaatcaaagaaaaccccgaatagccaagacaatcctaagcagaaggaacaaagctggagaggtatcacactacctaacttcaaactgtactacgaggctacagtaaccaaaacagatatatagaccaatgcaacagaacggagacctcagaaataataccacacatctacaactatttgatctttgacaaacctgacaaaaacaagcaatggggaaaggattccctgttcaataagtgatgctgggaaaactggctagccatgtgcagaaaactgaaactggaccccttccttacaccttatacaaaaattaactgaagatggattaaagacttaaatgtaaaacccaaaaccagaaaaactccagaagaaaacctaggcaataccattcaggacataggcatgggtaaagacttcatgacaaaacaccaaaagcaattgcaacagaagccaaaattgacaaatgggatctaattatactaaagagcttctgcatagcaaaagaaaccagcatcagagtgaacaggcaacctacagaatgggagaaaatgtttgcaatctacccatctgacaaaggtctaatatccagaatttacatggaacttaaacatatttacaagaaaaaaacagacaaccccatcaaaaagtgggcaaaggatatgaagacgcttctcaaaagaagacattcatgcagccaacaagcatatgtaaaaaagctcaatggttgggtgtggtggctcacgcctataatcccagcactttgggaggccagggtgggtggatcacgaggtcagaatatcgagaccatcctggccaacatgaaaccccatctctactaaaatacaaaaaattagccggggtgtggtggcgcacgcctgtagtcccagctactcgggaggctgaggcaggggagttgcttgaacccgggaggcggaggttgcagtgagccaagattgcaccactgcactccagcctggcaacagagcaagtctccgtctaaaaaaaaaaaaaaaactcaacatcactgatcacactgatcatcagagaaacgtaaatcaaaaccacaatgagataccatctcacatcagtcagaatggcaattactaataagtcaagaaacaatagatggctgggtaggctgcagagaaataagaatgcttttactctgctggtgggagtgtaaattagttcaaccattgtggaagacagtatggcgattcctcaaggatctagaaccagaactaccatttgacccagcaatcccattactgggtatatacccaaaggaatataaatcattctactataaagacacatgcacacatatgtttattgcagcactgtttacaatagcaaagacatggaaccaacccaaatacccatcagtgatagactggataaagaaaatgtggccatatacaccatggaatactatgcagccataaaaaggaatgggatctgccaggcacggtggctcacgcctataatcccagctctttgggaggccaaggtgggtggatcacaaggtcaggagtttgagaccagcctggccaatatggtgaaaccccgtctctactaaaaatacaaaaattagccaggtgtggtggtgagtgcctgtagtcccagctactcgggaggctgcgacaggagaattgcttgaacccaggaggcagaggttgcagtgagccgagatggcaccactgcactccagcctgggcaacagagtgagactccatctcaaaaaaaaaaaaaaaaaaaaaaaaaaaacgaaaaaaaaaaacaaaacaacaaggcatttgtaaactgtcatggccctggtgggagtgtagcagtgaggatgatcagagatcactctcatggtcatcttggttttgttcctcagaaaattaaatgtcagaagaccaagaagctcaagaggatgaattgctggccccagtgagtatttacgatggagatgaatttagaaaagcagtctgtccaaggtggagaaaccaggatctatttggatttgccatagaatttcaagatgtttgtgagcgctatctgctctatgggaagaacaccctggcagcgtgatcccgtttgcctggatgcaatttcttaaggaagagaccctagtatacctgaatattgtctctccttttgagctcaagattgattctcagaaaaaaagtgcagagaaggacagctcaagcctctcccaacacagagctagattttggaggaacttctggatctgatacagaccaagaggaaactgtggatgagacagctgtgtgcaggatgtggaatcattgttaaatatgatccaggaaatcttggactttgatcaagctcagcagataaaatgctttaatagtaatttgttcctgtgcaatatctgtttctgtaagaagctgggtagtgaatgcatgtacttcttggagtgcaggcatgtgtactgcaaagactgtctgaaggactactttgaaatccagatcagagatggccaggttcaatgcctcaactgcccagaaccaaagtgcccttcagtggccactactggtcaggtcaaagagctagtggaagcagagttatttgcctattatgactgccttctcctccagtccaccttggacctgatggcagatgtggtgtactgcccccacgcatgctgccagctgcctgtgatgcaggagcctggctacatcatgggtatctgctccagctgcaattttgccttctgtaccttgtgcaggttgacctaccatggggtctctccatgtaaggtgactgcagagaaattaatagacttactaaatgaatacctgcaagcagataaggccaataaaagacttttggaacaaaggtatgataagagggtgattcagaaggcactggaagagatggaaagtaaggagtggctagagaaaaacttcaagaactgaccatgttgtggaactcccatagagaaattagatggatataacaagatgacatgtactggctgtatgcaatatttctgttggatttgcatgagttctctctctagagcaaacccttacaaacatttcactgatcctgcttcaacatgtcttaaacagctgttttatgctgtggatgttgatgaagatatttgggaagatgagattgaagactagttaactactgctcaagatatggaagtggattggttttccctaatcttttgtcaagtacacaaagtaaccctgcaggatatttagggtactactcattcagtcttcctgtgtagaagatatggaagaacaagatttatattttcatgtggtactactgaagagggtgcattcatacattttttaatgcaagttgagaaaaattataagccaagggttcagaaaatgaaactacagaatattaaatattataatgtgtccaaagctctgaatagttaaaaattaaatatttattgccttccccaagctttacataaggagaagaggggtcaagagttaaacttacagaccctttgtctctgagaagcttccctctaagacattctgttggagttccctcagtactactccttacaactggggtaggtagaagccttatgaaaattatactgagaatctgatctcatttactccatgttaatcacattcttaccaacctaaatttctgccaagtcagttctctctggaggaagccctttactctgtaactgactggatggtccagtgtcattttgacctgcttttcagaatggaaatttataataatttaaaaatatgttttaataccacaaacgctatggggcacttgatatttattaatggtgtatatgctccactggtttcagggcaaatctagaatttagtgatactggctcagaagaatttaagttctattcaactttcctgggtgttagagcctagattcaaaatgacttgtcttcgctacttttgttccacattctctctctttacctttgccctaccttctgtttgtaaggacagtcttaatattaattccagcaacacatgtttttatttcctctgctggaataggagaaagcttaataatatattaatttaatataatataatcatattattcatatattcatcccaagctgaatgttcttgaattatctgcatttaccactgtatatgcatatagtgacagtataacctgtctataccactgtagttccagtcctaattttctgaattatttttaaaggtcttctctaacaagctatgggaatttggcttcatactctttttttgcaacagcagtgttttgggtgataattttgaattgataactgttcctttttctgggttttgttggccttttgaaaaattgtctttcgttatcgttggtgggtggcttagaagcaaagtaaaattttttggaaaagagaacagaaaattgaactgcagcttgagaacatattgtttttttcctactttgtcattgaaaattgaagaattgcttttaactgttttaggtgtgtgtgtccagagtgagcaaggactatgtttttggattgtcaaagaggatgcttaatcttaaaaataaaaataaatttaaaaatcatcttgtaattagaaaaaaaaggaatgagatcatgtcttttccagggacgtggatgaagctggaagccatcatcttcagcaaacttaatacaggaacagaaaaccaaacaccacatgttttcactcataagtgggagttgaacagtgagaacacatggacacatagaggggaaaatcacacaccagggcctgttgcggggtgaggggtgaggggagggaacatagaggatgtgtcaataggtgcagcaaaccaccatagcacacatatacctatgtaacaaacctgcacgttctgcacatgtatcctggctttttttagaagaaataaaggaaacaaaaattaaaaaaaaaattctcaaaggaagtaaaaatatgtatttaaattaatggaaatgaaactataatatattaaaataagtgagatatagctaaagcagtactgatacagaaatttatagaactaactgcatatgctaaaaaatgagaaaacatctgaaatcaataatctaagctcccacctcagggacctataaaaagaaaagcaaataaactcaaagcaagcagaaagaagataataaagataagagcagaaattaataaaattaaaaacagaaaaatgacacagaaaatcagtgaaacaactggttgtttgaacagatcaataaaattgacaaacttctattaatactgacaaataaagaaaaaaagacataaattactaacatgaggaatgaaacaggatatcactaaaaatcctgcatacatcaaagagttaatagaaaacactacacacaaatttgacaacttacagaaaatggattatttcctcaataaaatatgaactaccccaactcattcaatatgaaatagaatatttgaatacccctgtaactaataaggaaattgatttcataattttaaaaccctaaaaaagaaatcacctggcctaggtggttttagaagagaattttactaataaaggaagaattaataccaattctatacaatttcttccagaaaataggagttctcagttcattttatgaagccactgttagtgtgatatcaaaaccagacaagggcaaaacaaaaaaggaaatgacagaataagattttgcataaatatagatttaacaagctaaatctaacaaaatattagcaaatagaattcagctctaaataaaaagaattatacaccatgaccaagtgaagtctatttcaggaattcaaggttagtttaatattcaaaaagtaattgatgaaatccttcatattagcaagcttaagaagaaaaatcacaagatcctattaattggcacagaaattggtattcgacagaattcagtacccatccatgataaaaagtctcagaaaaacataggaataaaggggatcttactcaataaagtccattcttaccacttgatatagtttggctgtgtccccacccaaatctcacctttaattgtaataatccccacgtgtcaaggcagggtcaggtggagataattgaatcacgggaacagtttccccatactcttctcgtggtactgaacaagtctcaggagatccgatggttttataaataggagttcccctgcataagctgtcttgcgtgccaccatgtaagacatgactttgctcctcctttgccttccgccaagattgcgaggcctccccagccatgtggaactgtgagtcaattaaacctttttcctttataaattacccagcattgggtatgtttttattagcagcgtgagaatagaataatacaccactctattgaacattgtgctagaagttctagccactgcaataaggcaataaaaaaataaaaagcatacaaatcagaaaggaaaaaataaaatgatccctactgtgaaagatgttattctctatgtagaaaatcctaataaatttaccaaaacacacacgcacgcatgcgtgcacacacacacacacacacacacacacacacaacctttagaattaataagttatgctaggcctcagaatacaagataaatgtacaaaattaattgctcttctataaataagcaatgaacatgtgaacaccaaaattacaaaatatctcaaaaaaaatacttggttttacagggtttctatgctgaaaagtatacaacatgaataagagaaattttaaaatatctaaatgagtggaaagatgtagcatgttcataaattgaaagcctcaataaagatgtcagttcttcccagcttaatatacaagtttaacacgatgcctatcaaaatcccagcaagatcttttgtatatatagacaagattattccagaatttatctgccgatgcattaaaatagcaaaaacaattttgacaaacaaggataaaatgggagagatcagtctatctgatttcaagaacttttatatagctagagtaatcaagacagtagtattagaggagaaataaacatacacatcagtggaactgaggcaaaaaccaagaaatagaccacataaatttgctccactgattttgatagggaattcaaaagcaattcaatggagaaaaaagagacttttcaacaaatggtgctggaacaattggatatccataggctaaaaaaatgaactttaaacttacatcttatacaaaaattaactcacaaaaaaacctgtgtgtataactatttataagagccataaactggaaataatctatatgtcattgaatggatgaattattaaaccaactatggtacattcatgtcacagactcagcaattataataaggaatgaactgctgatgcacaaaacaacatagatgaatctccagacaattactctgagaaaaaaaaaagctgatcctagaaggttacatacagtatgattcctttatgcaacattcttaaaataacaaaataatataacttgataatagattaataatggttgccaggaattaaggaggggatgggaaaggagggaagcaggtactacaagagggcaacatgggggcagtgttctctatcttgactacatcaatgtcaatatcctgattgtgatattgttctatggttttgcaagctattttggggaaattgggtgaagagttcatgggatctctctgtattacttctctcaaatgcagttaagtctacagttatctcaaaatttaaaagtttaattgaaagtatagctgaaattctatggttaaaaaatggaatgctaaaaaaacagagattttaagtggctgcaattattagtttacaaaagctcccccgaggaaaacttccctctcttagactcacgttgatttttttactggttatagaaaaaaatctcatagcatatatactgaatccattctaatagaataaacagaatagatttttagagcaaacaactactttactttttagtgaccatctactttaactagatatataggtaaggagctggggcccagagtggctattatattaggaaggctgaggttagagtaggtatccaaataaacatatcctctaggcatttagaaatacaggattggaatagtgctaaaaaaaaaatcatgatcagagatgaagacttctaaatgatggtaaaattcttaaactttaagaagttatgaacttactaaaaggaaaaatattatttatactatgacaacatacctaggactacaaagtaggtccatgatggacaaaaattcacgtatttcatttcttttctagactaaatccggctacttgcagaaatataaagaaatacagcacatcttggacagcacccagaaatcacccttttgtaatccaaggggatgttatggcaaactcttcagaatgggtccagtctaagccccacaggtcattggaaagtttatcacctctcaaaggccccaagaagaataaacattctcaaatctgggccataaagaatgaagacataaaacctctcagcagcaagtgggagactgcttcttcaagctttggaatggatgcaaatgttctaaaatataagagtcttcaagctgaagaaactaaccagcaaagctctaagcatacagccctccatctaactaaaaataaggatgagcaggccaataagaatgatggacaacccaccttatatctgaagttccaaagggagagttaatctagctttatactgctctgagaactgtgaatgaaggataacatatgcttatgtagtaaaaagaaaaaaaggaaagccctccccttcccctttccctatctctccccttacacatgcatatgcataaactaaaaattttagatatcccatcttctgtagtgggaacatctttcagagatttaaaaagaaatccagagaaaatatggaaaaatattaaagcagatatttatatttagtttttatcagcatggaaaaaaatctctgaagttttgatttcttccaaaactacttacacattcgacaccaaaaaaacttaagaactcaaagtaggaatgacatataatatgtcactgattttaacctccctactagacactttaatcaattagtcaacaaacatcatttcctgattttctgttatatcattagtgtgctaggaaccatttctctctactaggagattaccacataattgtacagataaaacatacctgaataaaatgattacagaataagataaagtgttaagttgtgcacttccaatgattagaaaaaatactgtatattaaaagttgccagttgcacaaagcaaaagtgtggcacaacatggcactgaaatgcatagactgtggtttaaaataatcattttatttctcaaaatgtagcaaaggtgtaaagatgtacagtttcctttacagcgaattggtttacatctccagccatttattcatgtgaacactggaataagtccagcacctcagtttgtcattcataaggcagtgagcactgggagggatttgtgaaggacacacagaggagcaagtatgtcaggcagaagagtcaagatgcatgtagtaagtcagaaaacagaatcaagcagccttgagtcataggtcaacaatggcatccattagaggatgaggctaagcataagaagggtcaggtaggagaggtacattaaaaatacaggccacagcctaattacagctgggtggaactatgaagatctggggttgagtggtctactctcaacagtatttctagtagctaaagagtttccaaggagagcccactgcactgttaaaagagtaactattatgttttaaaggaccatgaccatagatttcctcaggaatctttaatgtctggtgggaaatagctatcttctaaatacattagatggtgctttgaaggcaagtatcctggttctcaaagagtaccccaacttttggtataaaattctcatccttagtgattatcttgggcaagagcagaagtctacttgcttttgggatgccctctgccaggtaggtgctcgggcttgggaaagccagaggttaatgttccggatcatagcatttattgtagctgacttcaggatggagtaagagttctcaaaattccattggcccttctccacaaagatcaggacaaaagcctaaactctgggaaaatatttttaattcagtgaaatgtcatttgaatcttcgactgcctaagagtttgaaattgtaaactctggaatgtattgtctttgtggatgaccaaaaaaggtgataaaccagtttcctggaagatttagggatgcacagatattacctaaacaattttaccttggtccataattgcactccttgtatttgatacaaatataagatgctttacccaaagtaagaggattggcagtccacttcctcactatgctacaatactttcagttttctgagcatgccactctctcataaaagctatttattctctcagcccagcatctcctccacctggcagcccctacttctttaagattcaactcaactgctgccttctctggcaaaccttccatatatttccatagaaatttaaaacaactacgatgaatatgctgacagttctaatgggaaaattggacaatgcaagaacagatgggtaatataagcagagagatgggaactaagaaacaaaaaaaaaatgctagaaatcaaaaacactgtaacagaatgaatgatgatggactacccaacaggtaagacacaactgaggaaagagtcagtatgcttaaaacaatgtcaatagaaactagcaaaacttaaatgcagagcaaaaaagaatgaaaaattcagaatatccaaaaactgcaggacaattttaaaaggtatgtaacgtgtaatgggactactggaagtaaaggaaaaaaaggaacacaagaaatattgaagcagtaatgacggagaatttctcaaaatgaacgacaccaaaccacagatccagaaagctcacagaataccaggaatgataaataccaaaaaaatcaaagaccaagaaaaaatcttgaaaaaaacaccttatgtatagataagcagggataagaattacatcagacatctcttcagaaaccatgcaagaaagaagagagtggagtgaaacatttaaagggtttaaagaaccactgtctcagctcaggctgctgtaacaaaataccataaactaggctgcttaatgaaacaatagaaatttatctcagttctgaggctgggaagtccaagatcaagatgtcaacagatccagtgtccagtgagggcagtcatcttggtttgcaggtggccttcttgttgtatcctcgcatggtagggagagatcatcccacgtctcttcttatgatcactaatctcattcatgagggcttcaccctcatgacctaattaccacccaaaggtcctgtcttctaatacgatcacactaggggttaggattgcaacatatgaaatttgggggatgcaacatcagaccataacaaccgctgactacagttctgtatccagtgaaattgtcctccaaaagtgaaagagaaatggactttttcagacaaacaaaaattgtgggaatttgtcatctctagagctgctcttttttttaatgttaaaagaaattctttagaaaggatgaaaattatacaggtcagaaattctggcctacgtaaacaaagggaaagcaatagaaaaggaataaatgaaggtaaaataaaatcttttatttttcttaattacctaacagataatagtttgttcaaaacaataacagtgtattcagaaattatagcttattgataagtgaaatgaatagcagcaatgttgtaaggaatcggagggaggaattgggaataccctgttacaaaatacttgtactaccaaagaagcaagtggtatagggttatttgagaaaggattggattcattgtaaatgtatcctgtaaattcaagggtaaaaaagaggtagaattgatatactaaaataggaaaaaaatcaaatcatacaaaatattcaattaaaatagaaggaggtagaaaacaagtggaagacaaaataataaaggtttgttacatgggtaaattgcatgttgtgggcatttggtgtacagattatttcatcattcatgtaataagcataatacacaataggtagattttcgatcctcaccctcctcccacccttcaccctcaagtaggccctagtgtctattgttcccttcattgtgtccatgtgtacctaatgtttagttcccacttataagtgagaacttgtggcatttggttttctgttcctgcattaatttgcttaggataatgacctccagcttcacccatgttgctgtaaaggacactatttcattcttttatatggctgcatagtattctatggtatatgtgtaccacattttctttattcagtccaccattgatggtcatctaggttaattctatgtctttgctactgtgaatagtgctacagtgaacatacacatgcatgtgtctttatggtagaacaatttatattcctttggatatatactgcataatgggattgctgggtcagatgatagttgtgttttaagttctttgataaatccccaaaccactttccaaagtgactgaactaatgtacattcctgccaacagtgtgtaagcattccctttcctctgcaacctcactagtttttttttactttaacaatagccattctgactgttgtgagatggtatctcattgtgattttgatttgcatttatctaatcattagtgatgttgagaattttttcatatgcttgttggccatgtgtatgtcttctcttgagaagtgtctattcgtgtcctttgcccttttttttttaatgaggttgttttttgcttgttacgttttttatagattcttaatatttgacctttcttagatgcatagtttacaaatattttctccccttctataggctgtttactgtgctcaaagtttcttctgctgtgcagaagctctttagtttaattaggtcccacttgtaatttttgtttttgttgcaattgcttttgtagtctttaacgtgaaatatttgccagggcctatgtccaaaatggtattttccaggttttcttctatgctttttatagttttaggttttacatttaagtctttaatccatcttgagttgatttttgtatatggtgaaaggaaggggtccaatttcaattttctgcatatgactagccagttattccagcaccatttattgaatagggtgctctttccccattgcttgttattgttgactttgtcaaagatcagatggttgtagggtacaacattatatatgggttctttaacctgtttcattagtctgtttttgtaccagtaccatgttgttttggttacatagccttgtagtatagtttgaagtcaagcagtgtgatgcttccagctttgttctttttgcttaggattgctttggcaattcaggctcttttttggatccacatgaattttagaatagttttttttttctaattctgtaaaaaatattgtagtttgataaagaatacattgaatctgtacattgttttgggcagtaagtccattttaacaatatcgattcttcctatccatgagcatggaatgtttttccatttatttgtgtcatttcttatttttttcagcagtgctttgtaattctcattgtagacatctttcacgtccctggttagttgtattcgtaggtatttttatctacttgtggttattatgaatgggattgcattcctgatttggttctcagcttggacattattggtgtataagaatgctattgatttttgtacattgattttgtatcctgaaactttgctgaagttgcttagcagatctaggagcctttgggcagagactatggggttttctaggtatagagtcatataatctgcagagagatagtttgacttcatctctttttatttggacgccttttatttctttctcttgcctagttgctctggctaggactcccaatactatgttgagtagcagtggtgcaagtggacatccttgttttgtgcccattttcaaagggaatgcttccagcttttgcccatttagtatgctgttggctgtaggtttatcataggtggctcttattattttgaggtatgttgccttgatccctagtttgttgagagtttttaacatgaagggatgctgaattttatcaaaagccttttctgcatctattaagatgatcaatagatgcaggaaagattgtttatagttctgtttatgtgatgaatcacatttattgatttgcatatgttgaaccaaccttccatccaccttgaacatggtggattagctttttgatgtgctgccggattcggtttgctagtattttgttgaggattttttcctctatgttcatcaaggatattgacctgaagttttctttttttcattgtgcctctgccaggttttggtatcaggctgatgctgaccttatagactgagttagagaggagtccccactccttgattttttgggatagtttcagtaggtttgctacctgtttttctttgtatgtctggtagaattcagccatgaatctgtatggtccagggccttttctggttggtaggtttttattactgattcaatttcagaacttgttatagtatgttcaggatttcaatttcttcctggttcaatcttgggaggtggtatgtttctaggaatttatccatttcttctaggttttctagtttgtatgcatacagtcattcataattgtctctgagggtttcttatacttttgtggggtcagtggtaatgtcccctttgttatttctgattgtgtttatttggatcttctctgtttcttcattagtctagctagtggtctatcaattctatttattctttcaaaaaaccaacttttggttttgttgatctttcgtatgtttttttgtgtctcagtttcattcagttcagctctgattgtgcttatttattttcttcttctagctttggggtcggttcactcctgtttttctagttcttctaggtgtggtgttagattgtaaatgtgagatctttcttttggatgttggcatttagtgctacaaactttaccctcaatcctgctttagctgtgtcccagacattctcatatgttgtatatttgttttcattagtttcaaagaatttcttgatttctgccttaatttcattgtttacccataagtaattcaggagcaaattgtttaatttctatgtaattgtatggtttagagaaatcttggtgttgatttctacttttattgtgctttattctgaaagagtggttggtatgatttcattttttctttaatttctgagaattgctttatggccaagcatgcggttgatcttagagtatgtgccatatgcaaatgagaagaatgtatattctgttgttgttgggtggggtgttctgtagatgtctgttaggtccatttggtcaagtgtcaagtttagttccagaatatctttgttagttttctgcctcagtgatatgtctaatactgtaatgtgtcatgacagtaaaagaaaaagttgaattgcttgatatgcaccatagattgagatctgcagctgcatttgcccactatttcagacaatttatttcataaacagataatgtaaacttaatggtatcaataaatacatcaagtacatgggagatacatttctttccatatatttgcccttccttatgattttcttaatagtttctttagttactttattgtaatacagtacgtaatacatatacaaaatatgtgttatcagctgtttgttttcagtaaggcttctgatcaacaataggctattaagtgttggggttgcaaaagttatacatcagttttcttctgtatgagggggttggtgcctctaattcctgtgtagctcaagggtcaactgtatttgttcacagatatcatgactgtctttgtagaaaatgcaaggaaatcaataacaacaacaaaaactgggagtaataagtgataatagcaagactgcaagacactaggttaatatacaaaagtcaattgcctccttatatgccagcaatgaacaattggagtttgaaattaaaaacacattaccattgacattagcaccaaaaaataaaaacgaaatacttaagtatgtgtcaagagctatatgaggaaaactataaaactctgatgaaaaaaaaactactaaagaataactaaataaatggaaagacagtctgtgttcatagacaggaaaactcaatattgtcaagatgtcagttctttccaacttgatctatagatcccaattaaaatcccagccagttattttgtagatatcaacaaactgtttctaaagttcatatggagaggcaaaagacccagaatagccaacacagtattgaagaagaacaaagtcagaagactgacactacatgcctttaagacttactatagactgagtgcggtggctcatgcctgtaatcccagcactttgggaggccaaggtgggatgttcacttgaagccaggaacttaaaaccagcctgggcaacatagcaagaccctgtttctacaaaaataaataaaaagaaaattctaaaaacggacttactatagaggtacaataatcaatacagtatgttattggcaaaataacagacagatcaatgaacagaatagagagacaagaaaaagatccacataaatatagtcaactcatctttaacaaaggagcaaaggcaatacaatgaaacaaagatagtcctttcaacaaatggtgctggaacaactggacatccacatactgcaaaaacaaacaaacaaatccagatgcagaccttattgccttcacaaaaattaactgaaaatggatcacagacctaaatgtaaaatgcaatactataaatctggaagataacacaggaaaaaaaactagacggctgagggtatgtgtaggaattacatgagatatctctgtaccttcctctcaattttcctgtgaacctaaaaccaatctaagaaatgaagtgtttaatattgaatttaaaaaaaaaatgggcagagatccagctctaaaacagcaccctgagaagcttctcacccactccccagtggtgggcagggaggggaacctggtagaaatattttttagaaaaacccatttaaagttttaaaaaccattaggaaaattgtcctaaggacatacatcaaataaagacatatttattcagaaaatttactaaattcctgtaagaaaagtgagggtctctggtacttagccatggcccactccttcccttcccccatgttcagcagaagggaaactccactgtgggaggatatggccaagaacactgggatcacagtcactccagctcccagtcaagggctatggtatctcccctaggaggagaaggctgccagcgtttctcatctccctaccgctgtgaagcagaaacaacatttgaggctaatgaggccaagaggtcagggactcccttcctccactcaaccataaggcaaaggttcagtgggctgggaatactggattcctggtcaccttttctccagctacttcatagtgtggagtttccatgccaggagagtcaagctgaagttgaaaagaccagaggctactacgccactcaggaccatgctcaaaaagtagatgggtcactctagaagatgcaagccactgtcaccaaccccaggtccagagcagtggctcagatatgttgcccagaggagaggcatgccttaagaacagagagctctgaagctgtcctcaagtaaactgacttgtttggaacagagtgtggggaagttcaaggttaagagtactgccaaaaacaatggagattttgacagtaagcaattaagaggaaatgagtagcttgataaaagcaacaagctcaaccataggccagctaggttgccagagaaccagtgaaagagacagtaagaaataaccctcttggagtaaaaacaaaaaaaagaaaaagggaagataaagaataagaaagaggccaggcacagtggctcatgcctgtaatcccagcattctgggaggccaaggcaggtgaatcccttgagcccaggagtgttagaccagcctgggcaacatggcaaaaccctatctgtaccaaaaaattaataataataataatataaaaattagccaggcatagtggcacgcacctgtagtcctagctacttaggaggctgaggtgggaggatcacctgagcacaagaggtcaaggctgcaataagctgtgatcgtgccactgcactccagcctaggtgacagagagaccctgtctcaaaagagtaaaaaaaaaaaaaaaaaaaaaaaaaaaaaaagaagaggaacaaagaaatattttagacctccagttaaaaatggcaaactggatacacattcaattttgctccctctcaaaaccaccaaaataatttattttttaaggcataaagctgaaaggatgacaagaggagaccattttggaagccaggaagcagaacaaatttaaacttctcaacaaaacaagaaagccagacataatgggacaaagccttcaaaattataaatgaaaattatttttaacctaaaattttatattcagtctaaatttgatcacatttgaatagatcaagttagaatgaagatattttcagttttgtaagttctcaaaaaattctcttcagtgtacccatttctcaggaagttactggagatttactctcccagaactgaataaatggagaaagagaaatgcctttgatgcaggaagcaggagatccaacctaggacagaagtaaagggaatccccagcatggtggtgatgtgagaagccaggacaacagctgtgtgtggtgtcaagccccagactggggcaggttggaagggtctgaaaagcctttctcaggaagatatagaatacttgatgcatagaaatttattcatagaagatttgataaagatttgagggttggattagtgttaagcaatagaaaaccaagcaagcaaacaaactttttaaaaaaagcaattatcttcagagaagatcaaaagttatgcaggataggaaaagtaatcttaattttctacatggctcagctgctgtaaatggtatttacaggcacacctcggagatatgttgcaggttctgttcctgaccactgcaataaagcaagtattacagtaaagcaaatcacacgaatttctggtttcccagtgcatataaaagtcatgtttatactataaggtagcctatttagtgtgtgatactgttatgtctaaaaaaacctaacggacataccttaatttagaaatactttgttgctaaataatgctaacaatcatctgaacctttgccttcacaacataaggcctaacatttggcttatctttgctttcacaatgccttcctcactaagcttaatcatttctagtttccaattttaaatgaaagacatgtgacacttcctttcacttaaacacttacaggccattgtagggacattaattggcctaatttcagtattattgtgtctcaggaatagggagacctaacgtgagagagaaatggaggaacgtccagttggtggagtggtcagaacacacggtcagaacaccaacacagagttggtggagcggtcagaactgaattatcaattaagttcaccgtcatatgggtgcggttcatggcaccccaaaacaatcacaatagtaacatcaaagatcaccataaccaacataataataatgaaaaagcttgaaatgttgcaaaagttaccaaaatgtgacacagagacatgaagtgagcaaaggctattgaaaaaatggtgccaatagacttgctcgatgcaaaaatgccacaaatcctcaatttgtaaaagatgcaggatccacaaagagagatgcacaataaaataaagtatacctgtgcatattccaatattgtaaacactgaatattgatttaaacaaaactataaccaatttggatagaggaggaagagaggaagcatacttctggaacatgcagtggggaagaagaaagctaaatcttcaccttttatggttgggagtcagtagattatgcctgaaactgaaaaatcaagaagtaccaatccaagcatgttatttagagaactgaggtaaatgcctaaagaatgagcacaggtgaaagtgcttgcctctgaagaggaagaaagggagagtgtgggactgccgattttcgtaagttttgaaaaactgactctttgaaaactaggtacatgataaccttgaataaatttcataaatataaatatgtttctatctcttctatatcacttcactcaccagtattgagttttcagagtaactactgtatattagtatctaaaagttaattttctgtcttaaaggcattaatatggatgctagactaaatatacagaaattccacttttcataataatagctaccattactatggtcccagtattgtactaagcacttatattatctccagtccccagagcaaccatgcaaagtaggtactgtttccattttacagataagaaattgatgctcaaagagattaaataatttgctagtatgtagcagaactctctgatctcaaagcctctgttcttccttcctcctggatcccatcacctctttctagagtttgcgtttaaaagaactaggggcagggggagggcaatgtagcagttcaaataactcctcctttggaggaagggcaaggaagcagaagagaaccgctgaaggattcagcaatagcactaggtagcagtctcatgtaaccaagtttaacccacagttgaaatttccagttggtcatgtgagcaacggaagcaatttttaaactctggccaggagccccaatgcttacaaaaataaaagctttgttcggctcttattttgaaataaaatagatgttccagctgctccaacatgggcctaaacactgcagtgagaatgctcaggacacaaagttttgtgtccagagaagcccagtcatcattacaaaattgatctctaaaaggggttgggggacagacggcatagctgcttcccaaggaaatgagtaggaggtgacctgggtcctgactgccacactggctgggagcttggaccagatgatcctgatgggtttcttctgaataaaattccgggttgtgtttatcttgcagtttaaatcactgggagcttcgagagttctttggctccttccctttctggaattattgtgtgatataatcaagacatttacctggctctttaaatcagttggtttgccggctacagtgtaggtaaagagtatgtcataatggacaataaaaagttgtttacatacctcatttctgaaaagtcatgggccactggcaagttaggaaacgaaagtgaaatcagctgatagtgacatcagtcagaacaaatgtaccaaagttcagagagctgtttactaggcacgactgcgaaggcaagggggcaccagctcaggactgcatctgcctgccatttcccttccactcctcctttctggagtctgacattagaaagccagcgagaaggaagattcaaacaaccaaccctgatttcctgcttctccttttcatgagtgttcctgtggtctctgcacctcctttctgtaagtaccgatcctgcaagcatcacagcttacccagacgtctactaccttgtaagacaattttgttttcttctcagatatttcatgttctggcaatccacataggggaactcactggttgttcagtatctgtgaccctccctcgctcatgtctgtataatctacataatctaccccctttactctctgctctccttccttccactcttcggcatcaacatgtgtagctctggcctcaaagatgatgaaagtaaggccagtataactggttagaaacgatgcagggctgactgcacacagcagagtcttgcacgcagtgtgtacaaggacatggctgtggcttgtgcaatacactgttcatcagaaataggtaaacaaaagcaggtcaccgaccaacactaactaaaccactattcaatggtagttacgaacacatcataaaactttaaaatacacactgaagattaatatcaacagaaaaacttgtgttcttgcctcaaagaatgggacctaagagatgtttagatcttatgttagtcattagaccagattgctcctcatgccccagtggaaatccatggtggtattttagttctcttgatgcatattttaagagattttttttaatgtgggcttagtttcactaataacttccactatgcttcttcgcctataaaatcaaaggctcctttgaaagagggaaaagacacatatttccttcttccctcatgataactgaagagcatttttcagtatccacttaccataccccattccccaaaatctcaggtctgagactcagtccatgagatattttttcaatcttgcacatattcccctttctcaactttctttccagcttagtccctgctttatctaattactaaggctgttttgaatgcctgttttataaatttctttttttttcataaatgtagcacataattctaaaaatattttactgcaaatagagaacaattgcctgtaatgtcaccacccagagctaccacagctaacattaacattttcaaatacttctttagtctctttctcctatgcctctttatatggatgtagtcacactatgtagagtgattttatacctgctttttctaaaagatgcatagtattttatccttgatacatcatagtttacttctgatattggactttcaagctgcttcccattttgtgccaaaagtaatgctgtgctgaacattcctatgtataaattattgactggatttctgattgctgtcttaggatagatttataaaagtgggccaaagagatatgactatttttagggtttttaatgtttattgccaatctgcctccctgaaagtttgtacaaatgttcacatccaccatcattgtgtgagaatgccagtttaaccatatttttggtatcatcaagtgtttttacctacagtgttgatagggaaactctggttttttacttggcgtatctttaattacattagaaaagttacagaattttttttcatgttagttaactactttgcattctttgtgaattatctcttcatatttgtccatttttaatgaggtgtaatgttttttgacagtttgcgtaaacattttaaacattaagtacattaatcatttcatagttgtggtagatattttccatgctcattgacttttaattatatttatgttgtttttggtgaatagaaatctttattttagaatagttaaacctgtgcaattctttatttgtagtttccatttgctcttaagttccaaattttatttttcactcataaatcaaatatatccttttttccagatcattgatttttttatctggttttacctttcactcttggatccatgtgaaatttatttgggtatgtggagtgagatgaggacctaaaatagttttgtttctcttttctagttagctgatcaattgcttcagtattagttaatgaagaaccctttcaggactcaaaacaaatatctcttctgaagagaggctttccctgaccctataatctagtcatcacttcctcctgccagtttctctctctcactcaccctgtttatttctttcccaaaccttttcaaaaattataattaccttttaaaaaatacatttggtgtttgccttcccaactagagtacaagctcaatgagagcaggcacctggtttgtcctgtgtggcactgattccccagggcctctgattcagggagtcatccaaaatgtgtcactaacagagttacaagatgaaatgctgaccccacgagtcgaagtgggtggcaaattgcctttgtaattgcggaagagagggctggtgcgggaaaactaaccattgacagccaaaggcagtcaccagtttctggtactactgattctcaaactctgaatcttgtgaatcttggccgcccacaaactggaccgtggagtcctgccaacagaaaccaaatgagattagctggacgtggtggcaggaggctgaggcaggtgaatttcttgaacccgggaggcagagattgcagtgagccaagatggtgccactgcattccaccctgggtgacagagcaagactgtctcaaacaaacaaacaaattaagatggctcatttgtagacattttctcatttttaaggattttcttctccctctaaactttttgtaatctttgttcccacttggattatctgctagtgagagctaatagtcaacaaaacaattgcacaaatagcaagttaatattaatggaaccatttaaacagctatctcaatggcttgtcatctgggtgcctggactcatgcttctgactttatgttataatctcatggtatagtcctattttgtctgataaagctgttttatttacatggaataattaagtaaatcaaaacatcacagcattcattaaaaacttggtggttgggatggctgtccacagaaaacactggtgaaatccaggagctgccaccacctacacactgttgaaaaacactgcagtagccctgttttgaaaagaattagaacctggactcatgtttctaccaaaggaaatatgacacatttccctttcttcttccctttttatttttgtgacagccacacctaaaccatgagcacactgatcttcaatgtgttccaccagaaatattttagccaggactggtggcctctgacaagtaaacctgcgcccttgttctatgccctggcaagctctgttgccccggctttattctgctaacattttcttcccagttctcctctctccattcaggcgacacacccaaccatgtctacctgactctccgtcaattcccgtttctcccactgagctattgcttcagcatcatgaccagagcagacacattgacccagtttgtgtcaggccccaagccctctatatgtgagtgaacttccttcagtctcacaacagcccatgaggaacgtgacaactgatgcattacagatgaggatgtgaggctcaggctggctatgtaacttgcccaaggtcatatgactagtgagtgacagaacgacgacatgctcccaggtcatctggctctaaaacccatgctccttaccaccacactgtgctacctctcaacaggcagctgcatcctggagtcatcacaaccaaacataaatgagaccagcttcctagagttcatctctgggaatgaaccctggcactatttgtcttcctagaatctcaccactgtcaggctggtagcctgggcttaacttctctgagcctcagttttctctctatcgtagtaataatttaaataatacttaccaggtcatgttctaaatgccatgcacaaattacttcatttaatttccataacatctacaaaataagttatataattaaagccattttacagatgaaaaatctaggcagaaggatgttaagtaactaaggtcacacagctggtgaatggaagagcagagtcttgaacccagaagccatagcttcaaggtccatgctcagaaccagtattccacactgtcttcactacgtcaaatgggaacagtgataataacatccacacaagggtgttgtgaagattaaatgagttaatgcacgtaaagggccaggcccccagttagaggtagatcctcatggtgattaacaatgcagcctgacaggctccatcattcactggctgtgtgaacttgggcaagttactgacccttactaggcctgtcttcttctctggaaaatgaagatgaaaacagtaactctaccctacatggttgtaagaaattaataagacaatacctgttaagtgcttagcacagggcctggcatatagtaaattctcaagagattttgaggtctgtttttaattattaataagttctcactaaagttagattccttctcagacaccttccactgatcaaagagtctcatcaaagcaagttcttccctccctggtcccctttggctttctgaaatcattaattaaaagaaaggccctaggaacctaatggcttacctgttttttcttttaatattctactccgcaaaatttgcaaagtgtgtaatgtttaacagcagcaaaattaaaacatgtaagttccatgcggcagtcctcaaggccatgatagcaactgctgctggtggtgcccgatggggaaggggctgccaaactatgcatctgaccaaggactaatatccagaatctacaagaacacaaacaactcaacaagaaaaaacaatcccattaaaaagtgggtaaaggacataaacagacattttccaaaggaagacatacaagtggccaagaaacatatgaaaaatgctcaacatcactaatcaccagataaatgcaaattaaaaccacaatgagatactatcttacaccagtcagaatgaccattattaaaaagtctaggcagggcatggtggctcatgcctgtaatctcagcaccttcagaggccaaggtgggcagatcacgagatcaggagatcgagaccatcctggccaacatggtgaaaccctgtctctactaaaaatacaaaaattagctgggcatggtgtcacgcacctgtagtcctagctactcgggaggctgaggcagaagaattgcttgaacctgggaggcagaggttgcagtgagctgagatcatgccactgcactccagcctgggcaacacagcaagactccatctccacaaaaaaaaaaaaaaaaaaaagtctaaaaactctaaaaacagcagatgtcgtcaaggatgtggagaaaagggaatgcttatacattgttggtgggaatgtaaattaatacaacttttagggaaaacagtatggagatttctcaaagaactgaaaaaccacgcaatccagcaacctggggtatcatatttattgatttgcatatgttgaaccatccttgcatccctgcaataaatcccatctgatcatagtgtattatctttttgatgtgccattggatttgatttactagtattttgttgaggatttttgcatctacgttcacagggatattggtctgtgttttcattttctgctgtgtccttgtctggtttttagtatcagggtgaccctggcctcggagaatcagttagggagaattcctttctccttgattttttaatagtttcaggattattggtattagtttttctttgtatgtttggtagaatttggctgtgaatacatctagtcttaagctttcttgggagttttttattattgattcaatctcactactcattattggtctgtttagaagttctatttcttcctggttcaatcttgggggattttgtgtttccagggatgtatctatttcctctagtttttctagtttgtgagcatgcagttgttcataatagtccttgatgatcttttgcatttctatggtatcagttgtaatgtctttttcatttctgattgtgtttatttggatcttctttcttcttggttaatctagctagtggtttatcaattttgtctatcttttcaaataatcagcttttactttcattgatcccaagaactaatatatgaacttttagtttcattgatcctttgtaaattttttgtccctgtttcatttagttctgctctgatctttattttttcttttctgctaactttggatttggtttgttccttttctaattccttgaggtgcaatgttaggttgttaatttgtgatctttctacttttttgatgtaggcatttaatgctataaacttccctcttagcacttcttttgctgtaacctgcaggatttagtacaatgtgtttttgcattcatttcaaagatgtttttaatttgtcttaatttcttcattgacccagtagttgttcaggagcatgctgtttaatttccattatctgtatagtttccaaagttcctcttggtattgatttctagttttattccactgtggtctgagaagatacttgatataatttcaatttttaaaaagtttgttaaaacttcttttgtggccttacatgtgatctatcttggagaatgttccatgtgctgacaaaaataatgtatattctgtagttgttgggtagaatgttttataagtccatttggtctaaagttcaatttaagtacaatgtttctttgttaattttctgtcccaatgatctgtctagtgttgtgagtggagtgttaaaagtcccctacagttattgtattgctgtctacctctttctttagtgatatttgttttgttaatctgggtgcttcaatgttgggtacatatatatttaggactattatatcgtcttgctgaatttatccctacatcattatacaatgaccttatcttttttcttactatttttaatttaaagtcatctgttttatcagatataagtatagctatgcctgcttgcttttggtttataattacatggaatatctttttccacccctttgttttcagtctatatgtctttatgggtaaggttagtttcttgtaagcagcatggatcatgttttttcatccactctgccaatctgtatcttttaagtggagcatttaatccatttacattcaaggttaatatggatctgtgagactttgtttctgttatattgtttattgttttcaggttgttttatagactctttgtctttgcctttttgactttgtgttttgatgaaactctgtcatgttgccatttgattcctttctcttcctttgtatgattgttttatacaaactatgagttttatacttctgtatgtttttgtgatggtgaatatcaaccttttggctgggcatcgtggctcatgcctttaatcccagtgctttgggatgctaggcagggggattaattgatgccaggcaggggcattaattgatggaaggtggtcaagaccaaccggggcaaaatagcaagatcttgtctctacaaaaaaattaaaaattaaccgggcatggtggcacatgtctgtatttctagctactcaaaaggctgaggcaggaagattgcttgagcccacgaggtcaaggctgcaatgaactgtgattgcactactgtattccaggttgagtgacaaagcaagaccctctatcaaaaataattaattaaaaacaccattcatttcagtgtttaagatccttttgagcatttcctgtagtaccagtctagtggtgacaaattccctcagcatttgcttgtatgggaaggactttatttctccttttataaagcttattctggcaggatacaaaattcttggctgacagacacactgtttttttttttccctttagcactttgaaaatgccatcccattgttttctggcatgtaagaattctgctgaaaagtcctcaattggtctgatgagatttgggatttcctttataggtgactagtcacttttgctaattttaaaattctttctttcacttgacttcagacattttgaatatgccatggtgaggtccttttgcaatgtattttcctggggatcactgggcctcctgtatctggatgtctatttctttaaatatgttttctaaactttctaatctctcttccccctcagaaataccaataattcataagttcagttgcttcttgcagtcccagacatctcaaaggctttattcattcttttttatccttttttcctcatttttgtctgactggattatttcaaaagtcctgtcttcgagttctgagattctttcttctgcttggtgtagtctactgttgaagtttttgagcatatggtgtatttccttcaatgaattttttagttccagaatttctgcttgtttttatttaagatgtctatctccttgataaatttctcatttatatcctggattaattttctgatttctttgtattagttttcagatttctcttgcacttcattgagcttctttaaaatcaatattttgaattctttatctagcattttgaagaattctctttgattgggatctgctgctgctggacagctgttgtggttctttgatgattgttacggtttgactgtgtccccacccaaatctcaacttgaattgtagctcccataattcccacatgttgtgagaggggacgccaggggaggtaactgaatcatgggggctggtctttcccatgctattctcgtgatagtgaataagtctcatgagaaccgatgggttcatcagggtttctgcttttgcttcctcctcattttctcttgccaccaccatataagaagtgtgtttcacctcctgccaggattctgaggcctccctagccatgtggaactgtaagtccaattaaacctctttttcttcccagtctcaggtatgtctttatcagcagtgtgaaaatggactaatacaatggtgtcatgtttctctgcttttacatgtttcctgtatccttccattgatttctttgcgtctggtgtagcagttgcttgttccaattttttgaaattgcttttataagggagaattttttcctgaggatatatgcatgttgttaagatgctttgactttgattttggatgcctgcagtcgtgtgatctttctatgacttcttcggcatagggtcagtgttctctgtgatttcctcagtgggatagagtatggtaattagctgagactaagtccccagaagtttagctgggacttggatgccaactgagcagcctttggaccccagtggtggcaacagtggggtaagtgtgccctttttaggccccacagcagcttacgctgctctggtggttagtgggtcttggagggctgattcttgggcctccacatggcttgcttagaagctagtagtgggagtggtgagcccagtgtgtgggcatgatctctagcccctgagcaggtggtgtcatgtgagtgatggcagtagcactgttgaagcagccaactgggatccaagcagtccatgttggtgttgctggaagctgtgatgggttgggtgagctactccccagtctcacagccacctgtagcagggtggtgggcactgttctaagtgtgcttaggagagcttggtcttccctgtccctttcctaccagggtggcagctgcagccacattgcctgattgttaattcagactggttatgaatcagcattaaactctcaaaatggtgccagctgtgggcttgtgaacagagaaggtggggcccctatcaggtgagcagcatggtcaagaagctgtagggagggtggtctacttgagtctcggtctcacagcaacccgtagcaggcactgggtattgtcctaggtatgtgcgggagagcatagattccttgtttctccttgactgggcagcagcttcagccacatcaagttgaactcagcaagaaggtggggcacagcccagcattaaactctcaaaatggcaccttgggcctgtgaccaggagggcaggggtccctccaggcaggcagcatgggcaagaagctgtagggaaggcagtctgctcacatttcagtctcaacagcagcatgttgcagagcagtgggtattgacctagatgtgcataggacagcctgatttccctgttaatccttggctgggtggcagctacagctgcaccagcccaatctcagttccagggaggggtgctgcccaacattaaactctcaaaatagcacctggagcctgagaccagagagggaggagcacctcacaagtaagcagcattggcaacaagctgtggaacacacaggatggccacatctcggtctcacagcagcccatggcagggcagggggtcttgtcctagatatgtgtaggatggcctgatttccctatccttccttagccaagaggcagctacagcctcatcagcccaaactcaggctgggaggggaatgcagcccagcattaaactctcaaaatgctaccttgggcctgggatcagagagtgtccctcccagacaagcagtgtggaaaagaagctgtggggaggggtgtctactcacatctgtctcaatagcagcccacagcagggcagcagaccctcccaggggtgcatgggagcacctgctctcccgtctccctccttgaagcagctcggcagcaagagccatgtctgtagagtcccagtatctaggctctcaaaatggcaccctgctgaggctgctccaggttcagatgcatgtgagattttgtattggtttcctttctggagcaatgcctctgtgcaatgtttaggcagctccgaatgtcaggcccaggccctggcccagtgggtcgaggtttccttccgtggccaagattataaaagtttgttttggagccctagggggttctctcttactgtttccccacatcaggagcctctcccgactctcagtcggttcccagctgggcaagctgcctcgaatcctctccttacttctcatgtttcccatatcttttctggtttatcctagcattctctcctagacaatctgttcaaaatggatccacttactattctggtttctcaccatggtggaggcacatactacctgtgtttagatagccatcttgatcctttcgaaaatttactctttcaataagaacctgacaaatacataatttagaattaaatgatacaatatttgtgtctctttcagccgccatcccattctcccttattagtatgaaaatgttagaggtgcttaaaccaacaaaaaagctgccttaaattaatctcctgagaatactttccttctatttccctaactaggaatttgtatcgcctttaagcagaaatcatctccctcctaaggccctgctcaggctgtaactcttgagtgacagtggtcaagttacatgctgacctggaatctaaatctgcatcttgttccagaggacctagtgcagcaaagcattatactttactgtcacaactaagatggcaaaaggctaacagcctttatttttaaagggttcatacagaccaacaaacaaaaactgaaactcaaaattatttttaaaatagcaaaagaactgacagcacttcacaaaagaagaaatacagatggtcaacaaacacttgaaaatgttaaactttacttattatgaagaaaaactatcaatgattcatcatttgtcattatcaaagaataaaagactcaagaatatgcaatactggggaggatgggatgagacaggcactctctgaaactgctggtggaaacataagttgattcacaaaaatattcaccatagcattcatagcattataaaataatgttacaaagcatctatgtataaactataaactatgatacagctatatgcagcccttaatgtttaggaaccatttctagttcacatagaatgatgttcacaaagtgggatacaaacatatatatttatgtaatcccaacagtgtaaaacaatagtgtaaaaagaagtgtgctgttcagagtggttatttctacgacctgaagtatagatgacttttagtcttttctctgcactttcatgtattttctagtttcctacaatcagcatgtgttattataaacaggaaaaggtttatctaaaaatggccacagtgactcagcagtctcccctttgccctctgaaggaaacactggcttatcattaaaggacatttaaaagctcattgtggtggaagtgtcattaccaggattgtttaagaaaagaaaaacaaaaaccagggaaggcccatggggaagtagagaagagtgtcatggggtttccaaccaaagatccatatgctgtcactgcaaaatgtttagggaaagaagcgaggactgacttccaccctctccatacacaagttcctgaattctgtccatagttcaacagaaagcatggatgggccatgccagcactgtgctgagcatgcatacgacattaaacacaaccctccctcaggcagctctgctgtcctaagatgtgtaaccaggattcgtacatgaaagaactcagggagcctatgtagcattttcattcgctcatttaaaaaaaaaaaacaaaaaaaagagcccctactgtgtatcaaaataacaaaactgaagactgttcctcagagacatgacactagagtggagaataaatcctaatttatagctaaaccagagtgtgggctgaaggagcccaggaatgctcttgctgcatggatcagatttagagaagcagaaagtagagtaggactctaggagctggggggtggctgaggatgggcagatgggaatgtattcatacacagcctgagcagctgagcaggtgctggactgcacaaggcaagaggggaagctgggcctcaccagagaattccaagttcaagttccaagtcgcaccagatgatggcgagcctcataagagctgggactgaatataaaaaggtgagaggccaccaccttctccacatgcctggtcctgggcttcttggctcgttttgttttgctctacattaaaaggtcagttgagagaaaatgaggaagtcaaaacaaaggctcctggcgtctggcaggagctgccgcaaggtggctgatgcaatctccccgaggagccacattaatttttaaaaaggcagctgttttcaaagcaaaacgtttaataattttttttggaaccccagtgtaacagaattcaaatgggaaaagtgagagggagtgtttaaacaaaggcatccccaagtcccttcccagttggtcctgaacaatggaggaggtcaaaccttcttttccacagcatgatggtataaatcagggaagtcctggaaatctattccacaccctaaaatacccaaacccattaaaagcacagatataggcttttacaaacatttactaaataagcaaaaccatacaaaatatgttcccgtcggcaatttttcccataccatggactcaaatggttaaaactccttatcatcccagactaatgccaccttttcaattcccaataattccttccgtaacaagcatcattgctccaagaatctctcaactacattcaaacccgagtcttcagacccttggccctctgggacctccagagcctttgacagtgccacccaaggcagcagccagggcttctgctgggacagcccctcactcctccactctgactgtccccactgggcttctctggagcagaagccacgggcagaactgggcagactgcccagtgctgctgagtccagagaagcggcatctgaggggaggcggtggcagtgtggaccccacccttactgtattcacaggccccagctctccatcagccagcctgcccaggtctctgccaaagaagtcgctggtcaatcttcattctcatttttggcatacacctaggtcctttgaatggagctgccctctctctcagcctgttccatgttctttattttccccacttggtccctttctgtaacaaatgcagtgtgtagaatgagacagaccttccagtcagctctgggaaagaggagggagctgttcccccagaggggtcccctcagaaactgatcatcagggctgtgtagccttcaggtcccttcccagggccacgactcattttgctgctgaacaccacctgggactccctgctggggcttccaggaggccatttggtatcatggccccagtaccttgtgcctcacaaagcttgaagctctgtgttcctagtcacttcctggtgaatgctgttgtattagtccattttcatactgctatgaagagatacccagtaatttgaaaagaaaaagaggtttaatggactcatagttccacatggttagggaggcctcacaatcatggtgaaaggcaaaggaagagcaaaagcacatcttacatggcagcaggcaagagaacatgtgcaggggaaatgccctttataaaaccatcagatatcatgagactcactaccatgagtacagtatgggggaaacccacccccatgatccaattacctcccactgggtccctcccacaatgtggggattatgggagctataattcaagatgagatttgggtagggacacagccaaaccatatcagccgaaacttatcccatactggaaaatacacatatgtaaaatacagtgtgcagaccactgtttcagagaccaactggacaaagcccttctgatttaaaacggagtgaaaagaattttttaaaagagtataacaaagtgggcacttttatatacaattagagggactatgattagcaaattttctgtaggccagttaggcagtatttagcaagatcactaaaagatatttctacccttgatccaatgattgcacttataggtagatcacctgagaaaaatcagattccaaacacgattcacacagcgtcttcacttataatggtgaaaagtggaaacaatttgtctagtaatagtgtaatggatgatcccacatgaactattgcacagccattgatcatgtttttgaagaatatttaacagctttgaaaaatgtttactaaatctagtgaaaaaacattacattcaacatcatgattatgtaaaaatacatcagtacaggaagaaaatattggtagaatattaacagtggttttatgtgtatgatgggataaaaggttatcttttttattattatttttaaaatatcttctggccaggcatggtggctcatgcctgtaatcccagcactttgggaggccaaggtgggtggatcatttgaggtcaggagttcaatcaagaccagcctggccaacatggtgaaacccatctctaccaaaaatacaaaaattagccaggcatggtggcgggtgcctgtagtcccagctactcgggaggctgaggcaggagacttgcttgaccccgggaggcagagattgcagtgagccaagatcgcaccactgcactccagcctgggtgacagagtgaggctccatctcaaaaacaaacaaacaaacaaaaacgtctaagttttctataattcatactaccattgtcaggaaaaaatatgtattagtttttaaagtaatgagtatatgatgggatttcatcaccaggtgacatcttgtcttgacccagtaatgagttcccagagcactgcaggtaaaatcagagtgggtgtgtcagtggtccttgacccaggctcaccttcgaatgagcttcagagcttcagaaacacaccagtgcccagcccgaagcacataagttgagctctgattgatctgtggcccagcaatgggtagttcttacagctccccaggtggttgtcttggcagctgtggtgaaaaccaatagcttcctccaccttcaggtctccattaagggtgggccttgcccttcacctcagtcaaaacccaccttcaaaaaagatctgagaaatcccctcactaatgtttccaatggcttgttgtatttggactggagcaaagcctttggctaaagagcacttcactcagtttaagatgtttcacactttcaaagctgcttgggagagacttttcctcctgacctcaaatcagagggcagctaatgacttatttgcaaataggtcctggcaggaggttacctcagacttctggtccttggtggagggcagggtaggagggaaacttgccatgagtttgtaagaaatgccaaagggagaacatgagcttgtctggacacagggaacaagcaagggagagatggactgactgctgtgacttccccgcaggtcccccggcagagggcagtagagatggccggcccaaggcctcggtggcgcgaccagctgctgttcatgagcatcatagtcctcgtgattgtggtcatctgcctgatgttttacgctcttctctgggaggctggcaacctcactgacctgcccaacctgagaatcggcttctataacttctgcctgtggaatgaggacaccagcaccctacagtgtcaccagttccctgagctggaagccctgggggtgcctcgggttggcctgggcctggccaggcttggcgtgtacgggtccctggtcctcaccctctttgccccccagcctctcctcctagcccagtgcaacagtgatgagagagcgtggcggctggcagtgggcttcctggctgtgtcctctgtgctgctggcaggcggcctgggcctcttcctctcctatgtgtggaagtgggtcaggctctccctcccggggcctgggtttctagctctgggcagcgcccaggccttactcatcctcttgcttatagccatggctgtgttccctctgagggctgagagggctgagagcaagcttgagagctgctaaaggcttacgtgattgcaagggttcagttccaaccatggtcagaggtggcacatctgctcagccatctcattttacagctaacgctgatctccagctccagcgatggaacccactacagaggaggtggggcccctgtgtcaaagaggccgaggggcagcaagggcagccagggcacctgtgacttcttagtacaagattgtctgtccttcaggacttccaaggctcccaaagactccctaaaccatgcagctcattgtcacaccaattcctgctttaattaatggatctgagcaaatcttcctctagcttcaggagggtggggagggagtgattgctgtcatggggccagacttccaggctgatttgccaaatgccaaaatgaaacctagcaaagaacttacggcaacaaacgaggacattaaaagagcgagcacctcagtgtctctggggacatggttaaggagcttccactcagcccaccatagtgagtgggccgccataagccatcactggaactccaaccccagaggtccaggagtgatctctgagtgactcaacaaagacaggacacatggggtacaaagacaaggcttgactgcttcaaagcttccctggacctgaagccagacagggcagaggcgtccgctgacaaatcactcccatgatgagaccctggaggactccaaatcctcgctgtgaacaggactggacggctgcacacaaacaaacgctgccaccctccacttcccaacccagaacttggaaagacattagcacaacttacgcattggggaattgtgtgtattttctagcacttgtgtattggaaaacctgtatggcagtgatttattcatatattcctgtccaaagccacactgaaaacagaggcagagacatgtactctggtgtgatctcttgtcctcagtgtctcttctgggctcctgtccctcttgctttatagctagctgcccggggaccaaggtacaggtgaaagcaaggtagcagcttgcgggaggaggcctgtctggcttaccagtctatacactgtggcctcaacctcccagacagggcagagaactgtgggcagctcgtttgctttctaggctggctggagaggtgggagctcattgatagactcatgatggaaactatttttgaaacaggcttcctccttcaggagagatcatgcggactaaactgtagcaattccagtgcacctggcagtgatccttttctttgcaaagtactgtctctttggttccagtaagttggaccaccacatgacatcattttccctggaacctggtcactgactaacacagacaattgggactccagagcctcaagagccaggagagggcacagtacatacagagggagtcaaatgggatctcattttgagtcctgccttccgcacactcagaacggcagccccaaggcccggagtgtccaggggcttctggcctgaggtgaatctgccaggcccaagaaggcacaaaggtaggagcacagagagccccattcccacaggcgggcggcccagcagcaccagtggaagctcagctgtcctccagctgctctcggcagacagttcagtgcacagtttatgccctagctgaaaaagatctcccggacgtatttcagcacatcctcttcctcctcctcctcagggctcctgctacaggcagagctggaaccccccggcctctgggaagggctgaggcctggagccagtgcctgtttcccactgtcctcttcctcactgctgctcccagaacttgtgtgaggcgacacggagcagggaggggagtgctctgggttatcagcccccgccagggccggctgctcgcaggccttttcctgtttgcggctctgtggagtacgggaaaacgcaggctcaacatacgtgttttatttccctaacatgctgatctgtcagtaacacaggatgtatctagaagcaactacaaagccaatgtgaccaggccaggcaatgtacccatatcctgagcacccaccctctcttcaccccactccttcccctgaccccctcttcacagctcttgaagaaaccagaacccactcgggagagaagcaagcaaaggcatgaggattagctgaggggaaaggaaaaagaaatggaagaaacatgtctagaaaggccggtgacagaacccaggatacaaaacctgggtgtgggcccatgccttagcactaggaaaagtcccacaccacagggttattgcaaggctaaaatgacataacgcatgctttcaaggcacctggtaaactgtagaatgctgtgcaactctgaggcactgcaattattactgcaggaagctaggaagctcagcatcctctgctcaggagaggggcaatggctaagaagtcatctacccaactgggaacctttccaagaacacaaacaggtaaacgcttcatgtcccatccacatacacaccagtgcacagtcacgctctccctaacacacacacgccctccctaacacacgcatgccctcccaggcttctagcctcaaagacaccccacgagcgcacacccacatggggagaggcctgggcagcatggccgagataagagcaagggaagtggcaggaggaagaagaggtagcctacggcagagggcgtctctcttactgacggtgaccaagggtctagcctctgcccatgcagagtttctggtcatgagtaagaggcttgtctgactttacctcaatcaggattcccagagcaacatcaactatctcagcctcattcatgcagtacacagtccttgtcgcagggagtctgaaaaaaagacatgcaaggcacagatgacacagactctcaagtctcataagggcaaagagaacaggagaagcagggcctcttccccctgccttcctaccacgcaggaggtaccagcacctctgagctgaggagctttctgacacggacacaatttcctcagccttgcagcccagtgactggcacagggcttcatggaggcaacaccggggtgcctcccaccctccaccaactgccctacaaggatctggaagtagggaaggatggccgcctctgaaacacacacatggatgcaagaggaagggaacctcgggctgaggctgtactgagaggaacctgaaagcaggaccagacttagggaaagacggcagcagtcacaagggaaggctgtcagtcaggaaaccttagaggaggaggagccagagagggaaacaccgagtgctggggccccgcccacttcacagtgcagcctggagactcaccaccccccccccgcccccccccggcaattaccgtcattcaactaactcactccccagctccttagctcttgctggccctgcagctgctgctcatctgtccatccctaaaggtctgtccacaggggcaggcaccactcagaacagacccttccactgatcttgcccatctgatgttaccatgtttgttgtaaaggaagagactggcattctggacaactggcatcagagactggctgacatggagaacccactctgtgtgtgctgagggcagggcactcaccagtgcagaggcagaagtgggtgcctgtcctcgagggttaacccgctttgcctcccgcccacagcccctccaccttctaaaagctcaagagatgatcagactgaaacacccgcccatcttgctgttctgcctaggctggaagacctggcccaggtcatggaggcccctgctccacttgccagattcgcaggagtcttctgaccagagctgtcgcaccttgctgctgccactggcactgctgccattctcatcctcttgggggccttcattggtgccacattctttgtagccacctgggctgtcagccatgagggaaggaccctcgttttagtctcggattgtaaggtttccatctctgtaccttctcacaaagaagagtcagggcccaagcttaatgacctgttttttaattcaggaaggtaaatctcgttctctcgtcacacccggaattacaggtccatttgtcctcagtgggagttgatctttgattcctacaaagaacaataaagtccggtgaattcccatacctccagtcatcaggcacagttactggtcggtgcagggcaggccagaagtgaccaaggcccaagagactcagacggccattcacaggcatcaggcaggtgtgattgtgggcaggacagcagctcaggagagagccctctgacctccccaaagctggtgccccctacaggcagccaaagccaaccagagatacctcctgcagcctctgtgctgactgactcagcacaggaggaacggaaggaggcggaggcccctaatgttccttctcattaccaccccaaatgccactgtcctctgggtgcccagcccattcaatccctaaaatacctcttaatggcctctccctcatctggccaactcgatttctctactcttctatggtggctcagttaaatgaaactgagggcattttatttcacaataaagtctcattggccaacacgccgcccttaagctaaagatacttctgattggtcaaacttgaagcagcaataggggcccggaggcattaactgtgccagtctgtagattctgaagcccacgccagcctctgatctagtttggcctctcttttccctatcccaattgttctgcctccactcagcagtcctggagctcagtcctcacccagagagatggagttgtgactcagagggcctaggtctctaccttccacttaggaatcaagccagaagctcctgaagcggaggtttgcccaaaaaaaagagtagtcagcgatagtcctctctgaatcataatttgataatgcattgctcatccagatggctgtttacaatttaagaaaaaatattaccaggccctcctcctaacctgcccggccatggggcacacctttgccaatgcaccttcatttctgtcaaaactcagtgatattagtgactcctaccccctaaggcgcctcccaagcgcaatgctgcagtctgtgcggacaaatttagttcaccctggggtgcctattaagtacatttcgcaaacgaggaactgagacttagttaacttgcagaagatcacagaaaagtttgaaatcagctggttggattcgcagccaggtcctgcagactccagaccccgcgcctccccgccctacttctgggccccaagagcaggccgcggcaacttccagaagccgggtctctggggcaccgcgctcgcggaccgacctcagtcccatcccagccgctccctgcctgggcagaatgggggccccgcgggaacgcgatgtgctgccagttcacagcccgccctccctctgcgggccggtacccgccgctggcggcgccgacctgtgggaggcccagagggcgggtgagtgcggagcggaaggcgcgggcgaagcaccgcaggggcctcgctgaccccgccacacgccgggcagggctgcaacggctccttccgactggagcggccgcgcgctcctccggccggctactggcttccctgctctcaggttcccgtctccggctctcgtgccccttcttagcttccagagcggagccgggaggcaaattccaagcggttgtgggacccacgcctcacccggaactttaagccctgccgtctcgcctggcgcccaaactctgcggacctccactggccgcccgcctcttccggccccgcgcgctccggggtcccgcgggctcccggcctcgggacacttccggtcttggggaactcccggccccctcgcagtcccggcgcccgggacacttccggctcccggcagctgcctcagtcggaggtccgcgggcgccccatgctggcagtggtaatgccgccggctggcatccggttggctgcgcgctgggaacgccagcgaggcagcgccaccggcttgaggagggtgaaagttcaattcttggcccctgaagttagcggaagggaacgggcatgttttggaaaggcccgccgggaattccctcagaaaccaggcgaagctccctgctgggccaggcccccctcgtgtgcttgaggaggatgggagcccggcctcggtttgttatcctaattaagtggaaaattaagaaaataatagaatagcgtaagtactaatagtaaaattatagtaagagaaataacaatagctagaatggaatgaattgctgtattaaccaaggctagaaagaatttcagccctccgaaagttaaagcgagggaagagagagaccctctcatattgttttatactcagtacctgtttttttttttttttttaaaaaaaaaaggaagtgaaatcaaagacaggcagcccagcgccaggcccaaaactggacctgggcctgcctggcctaaacctagtagttaaaaatcaactcatgacttagaaaccgatgttattcatagattccagacattctatagaagaacattgtgaaactccctgccctgttctgtttctccctgaccatcggtgcatgcagcccctgtcacgtaccccttgcttgctcaaatcaatcacgaccctttcatgtgaaattttagtgttgtgagctcttaaaagcgacagaaattgtgcactcggggagctcggattttaaggcagtagcttgccaatgctcccagctgaataaagccctttcttctacagctccgtgtctgagaggttttgtctgtggcttgtcctgctacagtccttggttccctgaccaggaagcgaggtgactgacaagccctgtggagcgtccctgcagaggactccggccagcctgactgacgcaatccaaagagcgctcccgggtaggaaatggccccggtggaatgccttgccagagcagcgcatagcaggctcccgagaaggattaacactggctgaacaccgggaaggaactggcacttgaagtccagacatctgaagcttgtcaagactagtttttggaacttgccccactccatgtgagtggaagcatggcctgatcacccacggtgtgcctgtattgacatctttgttctggttttgacttggcttgacttggtaagactagtctttggaacttgccccactccacgtgagtggaagcgtggcctgatcacccacggtgtgcctgtattggcacttttgttctggttttgacttggcttgacttggtaagactagtctttggaacttgccccactccatctgagtggaaacgtggcctgatcacccacagcatgcctgcatgggcactcttgttctggttttgacttgacttgaattgctggatactttggtttt

SEQ ID NO: 141 - DNA, 111246 bp, Homo sapiens
  source 1..111246: mol_type = genomic DNA
actgtagctttctgccactggttcccccacactcgccagtctcagtacaaaacgcattcattccatcccgactgccccaaaagtcctaacttgctccagcaccaattcaaaagtccaaagtccagagtctcctctagatcagatatgagtgagactcaaggaacaattcatcctgaggcaaatcccctccagctgagagcctcgaaatttaacaagttatgcacttccaaaatacactgggggacaggcatgagatagacattcccattccaaaagggaaaaaagggcaagaaggaaagaataaccaatcccaagtaagtctgaaacccaatagggcagacattaaatcttaagactccagaatgatctctgactcatcttaatgtgatcccccaaggccaggagcagccccaccctgtgctgggttctgcccatgccgcagctgtcacaggatggcatctagtgcctacatacagctctcccggctggggcggcaagctggtggtcccacagttctggagccttgggagtggccccgttcccatggctcagctaggcattatgaagtcatgttaccagccaataaatgtaatctctcttctttcctatctggatgcctttcatttcttgcctaattgccctgactagaacctccagtacaatgctgaatagaagtggtaagagtggacatctctgtcttgttcctgagcttagggagttttcaaatgagatgggcgtttctgtggtttgagggaaagaaattaatggggaaagaaactggggatatgtataagacaaaggataattgacagagatggatccaggggagacaggaaaaaagcaggccacttcttctggcgatgggagggaacaaaaacaactctgactgatgtggaaaggtaggaatgctgcccttcacacctaatggtcgtctcttctcagtaaagtggggcagtcacctggggaatggtcagggtagactgggggcttgaagcaaggaggaaacatcaggcatgactgctgctgtgtggaagaacgcggaccagcccgtggagatggacccacagaaggggccagcctggtgctttgctgtctctctgttcggtgctggttcaccaagcgccttcccctgcttctgggttctagcccacctgagacttttccctgtttattccctggcattatgaagtcatctctggaaactgaaatcatactaaaaatgtattatattgactgaaggcatatttcttgatcttaatttaaaactgatgtttcacgtttcttctaaaaaagtgggggcggtgcaaagactaagttacttatcttttctgactctgctcttcttaacagaagacagaaccctcctcccactttcaaggtgttacaactgaactcaaggtgcagctggagtaacaccctcctgcacaagtgtccggtcagcacccctttcccacctcgagggccccgcctgagcccagagacaccgcgaacaacaaagatggcttgggcagagttggagtttatttgctgcagttccttggcgctagtttacaaggcaaaaacaaacaaacaaaaacaattagaataattatttcttaaaaaccctgtcaacaactttcagtcatttctttatatttttgtattttgacaaaacttcttttaaacaaatacaaaataatctaaaaggagaaaaactatacatagattatttacacctctgataaatagactaatactgacccaggtgcctctctgtctaggaaacacttgagaaccaggccagggcccgggccagctggacaggctccagcaccggcccaaacacgcccagacctcggcaggcaccacctggttctcccacccagaaagttcaggtttccagcctggaccctcttctgtcaccctcacaagctctggcacaaaagtgcctaaagccattccctccaggtaggatctacacaaagtggcggggagggaggtgacagactgtccccctctattcctcccaccactcctctgcaaaagctatttccagagatgctcgccaaccctaaaggatcagaggagccgtggcgacgcggccctgtgaaaacccgcagctcctccacctgcctcctcagggctgcgccctgcaccgccctggtccagggtcctgtggaggggcggggcgagacggccagacagccagccacctgctctgcctggactggcatgctggccctggcggagtggcaggagctgccctgagagtccctgagagaacggcaggaaaatgctgcgtgtcacggctcccttcatactgtaatgaggaggggcagggccagctcacacagcgcctgcaggggaagacagagatgcgagaggcagcccggccacccccctcactccagtgcaccccacggagcagataaaggcccatcttcccctctagggggcccaccacaaaatgcatccagagtagtccagttagggctggttttgaggcagaaaaagctgaagccctacggggatcggggaagtcctactccttcctctagaacgaggactggagtctggggaagaggaagaaaacccaaaatgaaacaggttatccggaacctctgtcccgataaccttcctcacagttttggttattaggtatttagctcaaggaaaatgctgactttctactttaaagcccaacaagaacttggattctgaaggaggaaaataacgtaagcgtccagtcagctctctcctctcctcggcgctccgcaggcacttgggatggaaaagcatccgcgggagatgccggactgcacgctgctgccgactgcgaccccggccagggcaggcccccgactctgactgtgccgtctgaggctccactgggcctctgccctctgcgtcctcgacctcacctgtccatctcgcccagacaagcaccaggcagcgagctcccacagcacaggagaggcaggccaggccctgccgcgggcccaggctgatgccccttggccgcagccccaggtgctcttctccagggagaagctccccagcgcagccagggcagaatgcacctgaacagccctacgttctctcttaaaaaaaaaaaaatagatctttatagtatgtggcttctcttcctttccacctttttctcttaacatataataatatatggacacatgtatttatggtgcagggtttgaaggcttcttcacggggacaaccaagaggtaaacagttggctctgagctctgctaccagaacactgagcagagaaactggccaggaggctgccctgccgacaagagctctgccctgtgagagaggaaggctctggagcccatgctggacaggtggccggtcctctcttccccagtgataactgcccacccttctcccacttaaaaaaaatagcaaaagctgaagctagtctctaggaatccagggcggggcctggcagaggacgctctgctcggcagcagtgcatccatggaggtgcgggagaagagcaggagctccaaggcccccgcagaccaacgcccttggctgcacgctcagtgtcgcttcgtggaggagaccttctttttccgtgctgcgagcatttcgtagaaagggtccctgctgatggctgctctggagcacagaaaagggagaaaacagagacgtgagggacagaatcagaagaaacacacccaggcaggggattctcaggggcccctcgtgccccagaacacctgtcccaccccaccatcactgcaaaggccaagttagcgtcctccacccttgctgtgtccacacagtgacctaaggtgacacacttcgaaagagacacaggaacacgtgacaagaaaattttggggtttttacctgtttcaacataataatcaattcacatttaggaacagaatcataccacattcttacagctatattccaattcagagaaaaagactggtgcttgagtttccatgatgacatctgactttgctttgcagcagcgagtgccacgtaatcaagccgtgtcacatgcagtcctctggcacggggtgtgtgatagctggcatggtaatgcagtggggccttccaagccccccacgtgcacctgctcagtaactaaggctccatgactctgcaggcggcactgcccagcacgatgctgctggtggggcaccatggacagaccggctggacctggctgggtctccggtgcacagggagggggcccgagctcatgcttgtgctacagcctcaaagacagcagcgcaggccgcgccgcgggctggagcacctgcagtggactggcaacaccacaaccctatgtctgccattctcgactttcaagcaacttatggtctaaaagtcctgacacttaatttctttccagggaagctgtatcctaagtgatgatttgttccagagctcgggcacaagcctcctgactgcaggcagggcactcacccctgctgaacggtggcaccagcagctgctatggctctcctgggctgacctggaacctattcacaagagacagtgtgtccatgagaaaatgcttccgcagctccccggggaatgctaggaactgaagagcactagaaacatgtcccgatgggatctcactgggaagcggtctgaccacctgaagtgctttcacgagggaatctggcggccgggacacctgctttcatgtttggaggtgttggggtgaatctcccttggcttcctgggtaggccaaccctttcgggtaagctggggggttctgcagagaggtgcgtgtggcactgccctgtgtgcagaggcagagtgtcaggcgatgaggggggctgggctgcggtcggacaccaggccccaggcccggccctgcctggccctgcctgctgcttctcaactcccgcttcctcacatgcaagctggagatgccccacctccacctccctgggttccggagagtcaaaaagagatcccatattcaaagagcacatctcagcgcctagccgacacactcgatggcagccgctgttaccgctgacacgcagttctactgctgtacctctgggtacagcgtgaagaaagtcccagcattagagaacacacctgattctacagaaccgaatgctgggaccacccacacgcaggggcactagaactgagggtgctgggaactccaggaaaagcacttcgtgagaggaaaacacgtcctgaacttgacctcgaaagcctttctggcaatactggggaggaggcatccaccagccagatcatcttcctgctcctgttgtcaccaatgtttccactgggaggagtatctagggccaaggacagctgaggctgcacggtggttaccagtgcagctgcatgagtcacactgctcaggtttgaggaccagctccacctctgtggggttttggacaacttactcaactttgctgtgcctcagtgtccctcatctgtgaaatggggataatcctaatggtcccacctcgcactgggtgcaagaaggtttgaggacagtgtgcctgcagagtgccaaagggggtgtctgcagatcccgaggctgaggccagcccgctccgggacagagcagaggagtccagcaagcccacaggagaacttggcactcacgctcatgaaaggattgaatgattctaaatgtgactttgaaaaatgcttagtttttctgactatagaagtaaaaaccatatgaaagacacatgtacaaaaccagccaaaactgttttgaaagaccagtgagggaggacagggaactcgccagccagcacagtcaaaggacaccacgatgccacagggggaggggcgggcggcgctcacgctgggaggcgcggtggagcaacaggtgcatgaagcgtggtgggggagctgggtacactctaaggagagcatatgaagtcagtgggggcgatgccaatgaatccataaatggtgtccggaccatcagctattcattcatgagaacaaacttaaacccttacttcaaatcttatataaaaaatacatttcataatgattcaataaatttttttttcagtatgttaaaaaaaaggataccggtcccccacaacactgctgttttcttccccagaacacagggctggtgccattactggtaggggactctgaaaacaccgtggcaccgcgtctgctcaatggagggtgggctggcccccgctcagggccacacttcccatgatggctgtcatgccagggaagctgccaaaccccatgcccactacacaatctcatttaatcctcaaaagagccccatgaggcagaaatgacctctatcacacagaagaggtaggttacccacctaccaggcactgcgctcagagagacagagcgaggagtctcagcgcagcgtgacctggcgccaaatccatcctctctccagctggttcctgtctgttttcattgcatgaattttcagattacttttgagaggataaatcatctattcctttccctccatcatcacatcatctccatcttcagtcagttttaaggtatttagcttgggccaaaacctacactggtctgagtagaaataccaaaagataaaacaaaggctagaggatattgcacaccctcgggaacggggctgtagcctgggtgggagaaagcccgtcacacagtacacagaggacttacagggaccttcgcagtcacctgtgggcacattctccctgtcttccaggtgaagtcacacaggcagctgaggagtctttctcaggaaaacagctaggtgaactctcatggatgaagcaccaggagggagagggcaaggctgtgctcttaggagaaaggatcactgagagaaggcaaagtcagaatgctcactgctgaccctcgcacagggactggagggaggagaaagcatcactgagagaaggcaaagtcagaatgctcactgctgaccctcgcacagggactggagggagagccaggcagaccaagtcccagggaagaacattaagcaagagaagccaactgactttagaaagccatgtttccagatacttgtcacatgaggaaatttccagccccgtgatagaccttacatggcgtggcccagtggagccaacagagccgagaggtaggagtcagaggcctggacttgggagctccacttcttagctgtggaaccctgaggaagcttctccctcctcccggaccttggatcacggtatgtgacttccagcaaatttcttaacctctatgggcctcagtttcctcatctgtagctaggaaaatggtgtctcacaggattcacaaattacagaacatgactactatctcctctgagctgtcactatgagaatgagagcggcttcgtcagacacagaaagaccagttgagcagatggcatctgtgtgggtagctcactcgcctcttcctattttgggtctatgaggacacgtggggaacccagatgggacgtgctctcttacatatgctataatagccaagaatccaaaggcctcctgggaagccgtcagctgggaaccaggacgaagcttccctaagaacttggagcacagaagagatgcgggcggcatgtttaaccactaagatgatcaacacctggtgaggtgagggctgcaccaggcgcgcactgccctttctcagcagtcacttacttaatgcacttaatccactcctccttctcctcgggcgtcggagctgagatccggtaaacagtgtggttcccctccaccacccgcccgtcagcctcggtcttgcaggccttgataacttggtctttattgtcggggatataaagctcaaagcagttctgagaatcaaaacagagagggagagagtggagcaaaggaagctgttaactgagaaacatgctgatttctttccccaaaacccctttcttctgaccttcacaaaatacaaggaatacatattttcctgtggaaaagtgaagcctagaagcggaattctagagactgtaaattgtatagaagtcagtctcgtttgcaaacacaccggcctgatataagctggccccacttgcaatgtacgtaaaatgcggagagaactgcaggtgactcacgactttaacttcaagccagtaacatcctgacagcccaaaacaaaggaaaactaaacgggaggtgtcccaagggtataaactacatagcccactcctgcgtgcttgccgctgccattgcaggaggggcaacttctacaccccatgtgacattcactaagtgaaacgataaagcagacagacggcacaggaagaagtgatttcgagtctcatctttggcttgaacaatataataaaaaattagactaaataaaagcctgatcacgcttttcagttttttggttttgagttttttaaaaaaaatctttgaaatgcccatcccctttctcccctcaaaatatctcagcaaaaatactcactggttttttggagtcctccacttcccggatactcagattctctaaagggatgattccacggggctccttatcctacagaacagttgaagagaggaagtttaagatcacagtttaaggacacacactgtcagattcctcgccggtgactcagccgaactttcctgctttctcccaggacatgaagttcataaatcagcctgagggaactccttacattctaaacaagaataacaccaaaaatgtctgaggattgtcaatataactgctaagtcctccgcgagtagaaagaccagaagattcaacagacaccgtgagagtgtggccggcagtgacccgggcacggtcctcaagcagggagtgtgcgggcccctttccctcttccctttgcctggctctcccactcacctctgaagcctcagttctggggcaacaactccaggaagcctttcctagtttcaccctagcgccccgatgcctgggactgcagctgtgggtctgaccattaaccactcactgcctctgtccatcgccccaccgccagacagtacaatcctcagagacactgccatcctgacaactccacctggatttccaaaggcaccttgactcctgtccagaacagagctgcacccgccaactagtcccatctcatctacagagggcacggcaccgcagacacttccagcacacgcctgacggcagtttcacagtcccctgatatccagccaacccatggccaagtcctagcactgttaaagtctttatatttggccaggagaatggtgtgaacccaggagacggagcctgcagtgggcccagatagcgccactgcactccagcctgggtgacagagcaagactctgtctcaaaaaaaaaaaaaaaaaaccaaccagttctatgagttctctaaaagcgaaaaagagtctttcagccatttccccatcctggctagcaactatttccaacttcttcaagccaacctgcttggtctttacctctgtatctcacacatctccaaaataccatattagaactgccttttgactgcttgattttagatgttatctacagaagaggactgagctcctcttacccgggcatattcatattccccgtcctcctaaaataactatctggtcatctgaggtagggctatacacagtgtcttcattaacaccacgtttctcttccgacctgtgccatatagtgaacttcctaattttttccttcctgaaaagcttccttccccactggaaccaaaattatggagggtggagaagtgggttgttcctttgatttatatttctgtgaccttaccaccaaaaccaattgcaaatggttaacctcttatcaaaatctccttgctaatgctaatttgtatcaggcatcctattaattttcatttcttgaagtaatccttcctggagcctctgaaacctgttccagtctggactggttgccttgatactcggtaaactgcttcatccttaacctcagcactctccattccagagcactcttccctcctctcttgaaacaagaggtttcaagatctctggtttcctacagccaaggcctttgtcctccaccagcatcctgagaaagggtgtgtgggtggtaacatttctgaaatctcacttggctaagaatgtttctattggaccctcacacctggctgctatctggctgtgcctaacagtctaggctggacgtgaccctcctccaagactgggaagcccagcattcctgccttcagcattcaatatcaccctacacaaagctgttctggttgctggtgctttgcacacgactgccgtcctctgtgtcctcagtgttctgaggccccctaaggaggcagccttggcgtgcattcattttcagtcatcatgcagggtattcagtaagccttccaacctggaaacacatccatcgtttgggggaggtttaaaaaaattattttgtcaagggttaccccctctttgttttctcagcttctctggaacatgctagacctcctggactagttcttctttggaaaataaaagtctttcctttattattttccctctgcctttttattctttctgggagattttcttaatgcttttcttccaacttttccattgagttttcacttctaccatgctttgaatttccaggaggatttttttttattatttttgttccgtggcttcatacaggatcctgttcttgtttcgcagctgtgatgtcacctgagacggctgagtctcttcacagctggtggtggacccttcttcttcctggacccctccctctctctcatccaagttgctctttggctgttcggctgctttggtctctacctgctctcagccggcaggaattcctcaggtatctgggactccttggttgtcccatttgaagagtggaagactaagagctgactgggacctgaagcctgtgcactgtgaccatctacaagggccctctcactaggctgtctgctggggaatctgactaaataacctcacgcatctcttcttgggcagagaagtttcccactctgtctgcaagctacagacctggctacctgtggttctgagagctgagtgaggagaagctgggggtgggagaagtcctcagcattcgagaaggctgcatttaccccacactcctgtctggggaaaatgcccccaccttcaactgggcctagagtccctcatccagaaatgcttggtcagtctctcctgtgagcgagcactcagacttctgcctgggtggtggggacaggccctcaggggcatgaggtgagggcaacagctggtctgtttcctaaacagttctcagccaattctgcttctggtttttaccctccccattctcacttctagggtttaattggtgcctgcaccttttgaggattccgctgggttaactgggttgaggcatcaccaggcgagcaggtgggtggtctaagagtaatcacactttggacctcaataagtatgtgacataatgtatactctttgactggtgaggcctgcggcatccaggttacatatgcatgatgcacattcttgatggaatatgattttaaaccaagatgatttacacccatgctcttcagcctgggagtggggaccaggttataagaagaccctcctggtcaccgggagaacccactggggattctggtatccttcctggccccccctctttcctgctccatcctgcagagcgtggccctcctcgctcttctcagcacactcatcctgccacttgagaattggcttgagtgagccagcatcgcagacaggtgctcacgctatccctcagtgctggagtgaaagaagaatgagaaccactgatggaaacaactaaacgttaagctgctgggcagcaatgtaaaatcccaaatattaaaaaggcccctgcctagaactttcactggactctggcaggcctaataacaggcaggctgcacccctcagtgatgacttgtgtgtgcccaataaccactcccttcccctgtgaagagggaaataaccgaggccaacgtctttggctttttaaatttgtctttaagaacaatcactgttgctgtaaaaatacgaattgcttattataaagaactaaatattgtagaaaagaatacaggtgaaaggtttaaaaatactccaaatccaatcactcctaaattatcattgctgacattaggtgaagatattttgtgtgtgtgcagagagatggagaaaaacaggttttatgaaaatgggatatttcgagtggtattattttcataaaacacattctattttaattgtttagaatttaacagggggaaaaaaggaagcagaaactgaagaattgttgaacttcaaagtaaatgtttctttaccacaagagttcctgaaataaccttattcaagttaagacaaagaagtttatgaaaacattaagaggtctgaccaggcatggtggctcacgcctgtaatcccagcactttgggaggctgaggcgggcagatcacgaggtcaggagtttgagaccagcctgaccaacatggtgaaaccccatctctactaaaaatacaaaaattagccgcatgtggtggcacgtgcctgtaatcccagctactcaggaggatgaggcaggagaatttcttgaatccgggaggcggaggttgcagtgagccactgcaagatcgtgccactggactccagcctgggtgacagagcaagactctgtctcaaaaaaaaaaaaaaaaaaaaaggttttacttattcttttaaaaaatacaacatgcttccattttaacaatatttcttgactctgcattttaaaaagtacaaaatcttctaattcttcacattgttcctcctcccacctcctgatttttattatttcacttttacattgtccaggtttataacattcatggtacgtcctgcagccacaatttctggttaattagtatttgttttatatttaagcatattttagtattagctctatatttaagtttatttagctattacttctatatgagtatatttagctattagttctatacttaagtatattttggtattagttccatacttaagtatattttcgtattctgaacttaagcatattttagtattagttgtatatttaagtattagttctgtatttaaatgaatagttcaatgctcactaccagtcttttacttcccagggcctttcttgtgattcattctcttacgtgctggatgttactgtcaagcaatttttttttcaagaaggttccaaagtgccgcatttcacatgttttcttcaggagagtgcggccagctgtgctttacttaaacaataacgtggctggataaagggtcttgggtcattcttctcttcaaaactgtgcagaccttgatactttaatttctgggactaaaagctgctggagatgatctgctttttccaacagaacgaccagacacttggctccaagttcaatggtctaaggggccaggctttggagcgaccctttctgtaacagtttcctgaaatacggtgtcttctttgatttgcagattcagggctttttcctctttctcagggaaatcacctcatgccacactgtatctttgattctgcagacaccaattactctggtattattgggatcgtcttctgttctctgcatctgctagcttttctctcattgttttaatacttgtctttttcagatataatctctgtgattggctcaagcgtttaagacattatatttataggacatgattatattttcagctaatttgttccactccttaaagttttaacttacctttaagaataaataagttataattctatgattatatattaatggttgcactgtaagtatatgctattgcttgggttctcacttgtttgaagacggaaaccttgcttttctggccttccagctggctctggtaaatctgtgagtgacccctggttctcctcctgtgaatctctgatctgcttgtgtccccctaaccacttaccctgacctgtggtgggcggccaggtgttctgcattctagcatattatgcagtctcgtagagaatggtgagtggtgggagagctcatcgaagatactccccgagttctggtctttcctctcggattgtaagtatccaacgtcagggtttgctccatctatctgggcagcagtccccagcctttttggtaccaggaactggtttcatggaagacaatttttccacggacaaaggcaggggagggaagatggttcgggatgattcgagcacattacatttttttaagttaattaatttatttatttttattttggggggcacagttttgcttttgttgcccaggctggagtgcaatggcgagatcttggctcaccgcaacctccgcctcctgggttcaagcgattctcctgccacagcctccctggtagctgggattacaggcatgtgccaccacacttggctgattttttatttttagtagagacggggtttctccatgttggtcaggctggtctcgaactcccaacctcaggtgatctgcccaccttggcctcccaaagtgctgggattacaggagtgagccaccgcgcccagcctacattacatttattgtacactttatttctattgttattatactgtaatatataatgaaataattatacaactcaccatgatgtagaatcaatgggagccctgagcttgttttcctgcaactagatagtcccatctggggctgatgggagacagtgacacccaacatgtgttgcttgtgtccagtctactctgtaatcactctttggctgctgtcactgcagaaaacactgcttcacaaagacaggatgttgggcgtggaagcaggctttcagtgcttttggggcaatctcaggatattctgcctcaactttaatccagaacatatggagatttgaagttgtctcaaacgtacttttaaggccactgtcatttgcgatctcaagcagttgatcttcttctagcattggccaaggtgattcacctggcttattctcaaatgggtcacagatccattcctttccagttcaggttcttttgtggttgggaagtatcgctcaagctcttctgaaagctgaggcgctggggcaaagaaggccctggctccgtctctcacaatctctctaatgtttgaaacatgtcagaaatcccagtgttcactcatcacccctgtaattccagtttggctttgaaagcagccacttgatctgccgactgggacacacttgtcactctcccctgaagtgacagattgagtttgtgagtaggtttaatctgtcacacaagtacacaagtttcctgacctatattctgtgtcactgaaatgtgctgctagtggtgactttttctagaagaaatctctgaagtggctgttgcaactcagaaactctggccagtgatgtgcctttagagagcgtctcactctgtgtatcacagaagccgtgtgtgctctgcgtccatctcctccgagggctgcatgaacagacctgagttaggccatgtactttaatgtggttggtaatttcaatcgcatcctgcataaatgttgttaagttcaggtgacactttttggctagccagcacttctctatggatgacatactgcatagactcacatttagaagtgacctctttgacctgagtagtgaaaccagaaagctgtccagtcacggcagccgctccatccatgcatataacaccacaaaacaaaacagttcagtttccctgatatgtaataattcaaagacttgaatagcagccgtggtgttggttggcaactaaagcacacataacatatcctcatgaacatccccctgaaaaatatgtcacagaagaacaagcattgttgtcttgttgtcaacatcggtagactcgtcaacctggattgagtaccagagtgactcgttaatcctctctaacaattgtgcctcaatatctgctgctgtttcatcaatctgcctagttacggtgctggccgaaagagcaacatgtgccaccttttgaaccacagcctctcctaaaagcgcatgacaaatgtccttagcagcaggcaggatcaactcttcaccaacagccagtcctggctttggcaatgcggttagacacgaagaatgatgctttcagcgcagacatatttgatgaagtggtggccttcaataattgcttctgttcttgatgtttacatttttttcttttgaaaactccaaaggcttgtcttttgatgcagggtgcttggtctccatgcggtgaggcagttttgaagctttcatggctttgttgggtagttggtcaccacatattctacaaagtgggcttggcgaatgtgatcacctgttgaaatgaacctagaatttgagtagaactcttggcgttttctttacaatgcagctttatttttgttggcagtcttggcgtgttctgctgtctcatcaatgggtctctcccccttttcaaagaagctctccagtgacgtttggtttttactcattttggctagggttggtggatgggcttaccaaaaccatggctgagacaagtacacagtgtgggaaagagatgtggatggcagtggtaaataaaataacgggcaggccatgcacggactgaaataagtgttggattctgacttaaagcctgccaccagatacagctgtacaattgaagtacatcagctcacttgccactataaagcctgccaccagaggcaggctaattgtcacttgccactcactgatagagttctgatgagtctgcaagcaactgatgtattattatggtctctgtggagtcaaacctctctgctaacattcatctgtacttgcagctgctccccagcactagcatcactgcctcagctccacctcagatcatcaggcattagattctcaggaggagtgcacaacctagatctctggcccatacaatttacaatagggttcgtgctcctatgagaatctaacgccgccactgatctgacaggatgtggagctcaggaggtgatgtgagtgatggggagcagctggctgtaaatacagatgaagcttccaccgctcgcctgccactcacctcccgctgtgtggcctggctcgtaacaggccacagactggtaccgtcctatggcctgaggttgaggacccctgtatttggggatggatatcatgctcatgggagaccctccatggacagtcttccccagtgaatatacagtcttgagcctttacttatgtctataacggctgcttttttcacttttcccatttcaccaatgtccacccagcaggggattttactactccttgatcagggaggaaaaaataacaagtcctgttcagtttgcctcctcccagacctgagaaaccagcgagactgccgggtctcctcaaatcctgggccgtgaggtagaaaccctgcacactgctcctgactgctgcccctgccaccgctgcttccgctgctgcccagggctgcagtgcactgaattcgttctgccccttcccctgcttggttgctatttttccctacttatttttttactagtcttttgctctgttaggtaattctgtgtggaagtttcaatctaccatcttaattctgacagcatcctctctgtgtcttaagaaatgtattcagcactttggaaggctgagatgggcggatcacaagatcaggagatcgagaccatcctgactaacacagtgaaaccccgtctctactaaaaatacaaaaaattagctgggcgtggcagcagcgcctgtagtcccagctactccggaggccgaggcaggagaatggcgtgagcccgggaggcggagcttgcagtgagccgagatcgtgccactgcactccagcctgggcaacagagcgagactccatctcaaaaaaaaaaaaaaaaaaaaaaaaaaaaaaaaaaaaaagaaatgtatttactgctgggtgcagatcacctgaggtcaggagttcaagaccagcctggccaacatggtgaaaccccatcccatctctacttaaaaaacagaaaacaaaacaaaaaaaaacggatgtggtggcgcacgcctctagtcccagctactcaggaggctgagatgggagaatcacttgaacccaggaggcagaggttgcagtgagctaagatcacaccaccactacactccagcctgggagacagagcgagactccgtctcaaaaaaaaaaaagtatttttctctgtatttccattgcttgataaaatgctacactttgctgaataaatattgctgaattaaggattaaggtgacaccactacggtgggcatcacgaaaaaccacaagattctagaatctcgtagcattgctataggattgtccaggacttagaagtacaccacttagatgcttatgtatcattttgacccagaaaatagcgagacaaattcagacacgatgttaaagacatcgttagtgtaggtgtcttcagaaaaaaggcaaaatatagggcagaagggtgaacaaaacagaaaaaattgtaccaagatgttcacagtggtactttgggggtgaagcagaaagcagctttctttttattattttgcagatatttgaagtgtattactctcatatgaaaagactataacaacagaaaagcaaagccagtgcagaacttgcagggcatgagctgagcccctacaacatatgaaatcccggccagaattcccttcacagtgatttactatcctcagtcaccaaaccatcagaagcagcggctcttgcctgcagcctgatgggctacgaagtgcattccctgggtgagaagctgcatgtgcatgatgtccatggggatggagaacaacgctaagtgttagacacgacagaaacccatcttcacacctcacagcagaaaatgccaaggcgtgtacctgtttcttggtcctaaataagtgactggtgaatatggtcaggatttcaatgttttacttaagccccattttgctctaaactgattttaaaagatacttctgagtcttaattttctcagtgggatcaatgacttttgctccatgaagatacacttggagaacaaaagcaaagcattctcaactcaacggccttgatttactttaagacaaaagttcgatgccatgggagtatgcccgctttgcccttacaatgaccaagaaaggtggcagaaatgaaaaagcaccccatcaccagtccggtgagccacggtctccacaccaagtgctaacttgccagggttctgggtaccttgcttagagggagctctgaaaagagctaatttatgatttttactttctttggctattattacaaaagagatatacgtatataaaacacaaatttgcagctataagtctctcccactgaataaaaaccaacaaaacttcttaaaactccagataatctcaaattgacttttcccatttcacttcacttccttttcccccactatatattttaccccttgggctgtttcttctgaaatcacatttctgctaacccagaataggtgaattttctaaatcacgattatttcctttttcttttcatctccctttcaattagggccacatactctttctcggcaaccaatgcaaattcattctttctagcccagttccaaaacccatttctagtgctccccctcctccaggccaggtatctcctgtcccaccagaaccgggtgcctgctctgagcccgtgccctttaaggcacgcacctcttctcaggggttccccattctgagatttacttcagttcttgcactttgcttaaactctcccccatcccccacagatactgaagggcaaatccaacggtctcctcaaccatgtctgattagagacacttggaaccggaggccttgcccatccctagtctggaggccgactagcaggtgctcaccgtggtatactcaaagtagtaaaggcagttgtcagtcagaatgaaccagcgtctcttccaagtctttaccctgccacctgcagagcaaaaagagatgcacgttcgacaagagacaaccagacaagtgcaggctccacgacacacacgacaccctctcttctcagagagggttgggggagaggcatcaggagaacgtggagcccacaacattgacatcagtaacaagacacagagctgaaacagaagcgtctttcacaaagtgaaagcctgtgggtacaagcagagcaagcgcatctaggtgacacccggagatggaatcgggacggcaggatgagcatgggtttgtggcgagaaaacccggggcaataatgacatacaatgcaaatttgccagagtcagcaaaaagcctatgtggtagaaattgccaaagaacagaaaaagagggaagggtcagcacctagtgcaggctactctgctactgacaagcagcccggcacataaggagtgtttcactggaagtgaaggaaggaggaagcaggaggggagatgctgggagccttcaaatccacactttccctggaacacgaagtaaatccccatggttctactctcttcttcaccttcatgattacagtgagcttctacactggctcttaaccttatgtgctagtgtcctgaaaacaaaatctcccgggtcctgggtgagaatcaaagcagaattcctctatcaaggaagaatcaactcgtactgagaggtggcctcaggagccttttccgttctgggcttctcacctggagcttataacagaaacagctggcaaatacagccatggcaaaacaagctctggcggtggtggctgggaggctggcaagggcctcccttggttctttttagtatttctcagcacaaaacactggggtcatggctaggcacaggggctcacgtctataatcccagcactctgggaggtcaaggtgggtgggtcgcttgaggtcaggagttcaagaccagccggccaacatggtgaatccccatctctactaaaagtataaaaattagccaggggtggtggcacatgcctatagttccagctactcaggaggctgaagcatgagagtcacttgaactgggaggtggaggttgcagtgagccaagattgcaccactgcactcccgcctgggtgacacagggagactccctctcaaaaaaaaagaaaaaaaaaagaaaaaaaaaaaagttggggttggggccgtgaagttatgctgagacagacatgaaggaaggaaaaatttccccaagcctatctgaatgaagctacacctgctgtcaaatcgggaccacaggctttctcttcctccacctctctcccatcaagggaacattttctgaacatgaaccactcaaaacttatccctaaggccttgacctgtgaagctatgcatggcattctagaaacacttcttgtgcctgctcttttgctaagacttaacctacagacaataccgcttctccaatcttcctaaatagcaaggatcatggggcataaatctcatacctccgatcatgctttctctcttgccctcatcacaaatagctgagcaaagaggagaatggttttacagggattattctaactgccaggacctgcctgcatgctcacaccagagaaacctaaggggagtatgcaaataatgttatgaaaagaaaatgtccagcgtaggtcctggcagacaagtaaaaggaccactggactttcaggccagtttttagcaccctgcttggatgctgaaccctaggcgggcttacgtgactgatcattaattgccaagattccaaatgacacagatctaggttatgcgagggaatttgctgtaagcaagcacgtgccctccacctgcccatcctgtgctatatcaagcaaattgagactctccctccagtaacttctaagtttcatgtgagcccttgccactggtccctaaaggttagatggcatgaattaagagaaaaccataaatggatactatgacatgcatgtggaaaacaggaaagcccgggcagaattaaataaggaggataaagaaggcaaggactatattcaggattgaagccaatttgttcttaaaaaggaaccccctccaccaattcagagtctgagaactttggtcttccagcctggcgggccattggttgcccacggaggctcggcacaaagggaacatcaacccatgctgacctcccatgcgctccatcacaggacactacccggggaacccttcggacataggagatcatggaaaaagcgagtcagatgctaaaagaaacaagatggaaagaaatcaaggagaaaaagcaaagccagaagaaattctctgcctgattacaaaagcttggttattatgcctggacaatttgttgcattacagagacctctaccataaagcatcactgtgggcccacggggaacatttccacgtggaaagaaaagcagacatgaaacaagcagacagatcaatgtgcgcctaggacagtccctgtggaactcacaggaccacctcccactgcacggctcctcaggcctcctgtgacctccccgagacatcaaggccggatgccatcttcccctacagttgagaacaacctgacaagtccctgaagcatctcagtaactgtgcgtgtttggggttgttctttttaagtgtagctactgctcagggaatgcttaggcacaaacctgaggggtcttgggctaagaaaatatgtttccccaaaaaaaccagcaaatggagaggagacaccaaaaccataaccaggagaccgattcggggctttaacgaggactcgctgaaaaagcgagggagcaaaacaaaacataacaacagagccgaggctgttaatacccttctctgatccccaggaaactaaacacgaggacttcagggagggttttttggtttggacttgtttttttcaccttcactcggtatcattttgagtttaggaaataccatttccccttttcgtgcaaaggcaaatgtcttaagtatcatctaatttagttctttccctagtttgcttttccatcatggtaaatcagaagctttccatagctttgggaagtcaagactttgttctctctggagtaagtctcagcttgaaaaaagaagaaaaaagaaagacttccttctcttctttctcctcttccccacgtcagagattaactttcaatcaggctgattaatggacgtcaaattgaatatcaaacatagcgcatgtcttagccaataattccaagtgaaaatgtcatggaaacttcctctgcttttacaaacccactcttagtatgttttcttgcattactgcattcagtaatgaatataacatatactcctccaaaaaagaaaaacgaaaattgctccaaacccctgatcctgaccagttccctagggactgtacaataagttagaagcagcattaacactaccaccggcaattaaaaaacaaaataaccaaaaataacgaaatcagaaaatgctgcagtaatgacagtggcctagcagagcgagcgagcaggctgagggttacatacctcctggagtttggggcaaggaaaaggagagccaaaatcatggaaacatacaaatgagggagaaaagaaaattaaaacaaagaaattaaacccgattccttaatcttaaagtgcaatgtatcagtcacattcatgcctgcctggggagagagctgaactaaaaacactcaacgggcaaatgatcccactactgtctggcacgtgaacgaggggctcttacatgccacgttccacctcatcaaggcaagatttgaggcactactggaaacctggccccaaagatgccacaaatcggcttttacaaagccaatgtttactagtatatccagaatcagagcaaagaaagctaaggttatttcagggaaaattaaatgtctttcttgagatggctgtcactttttaaagtgtgtgtaagaatgcacacacatatacccatgagtacacatgtactgatgtgtatacacaagaatacacattcttatggctatatgcatacacagacatatacacacagctacagacggctggaagccctgccttctgcagcacataaacacaaagagtgatactaagtgtgctacaatgaaaacacaatattcagagtctagaaggatttgatggaggtttagaaaaagtaatgcaatgagctaaaactgagtcccacacttggttaaattttctcttttttaaaatacgagatgcctcatgaatttgcatgtcatcctggtctaagaaccaagataatctttgtactgttctaattttagtatctgggctgtcaaagctaacacttagtattagcatttaaacaaatctcgctgtagggggaagtaaatccaaacttgaacacactttaaacgtttccagtaggtttcctttcaactccatccacttggcaataggaatgtggaagggaaggctgcctatggggttagtaattttagagccttaacttcaaagattctgggggcttaaagatatataaaatgatggccaattcaagagatatttaaaactgatcggtgaagtggtgctgtaaggggaatttatgaattaagtcattatgtataagcacaaggacttgggatatgactttaaaaggaaatataaagtctactgctatctgacctagtcagaaataaaggattccattttagccttcccagatgtgtcagtaatgaccaagagagtactgacttctaatcactggggcaagcagttgggctggtataggacggaacagcccctgctaatgtgagaacccaactcatcaaaggctaaagcagaaggcaacagaggaaagtaccctgctagtgtccaaaaaaaaaaaaaaaaaaaggacatcattatgtccagagagtctagagctctatgttctgaaaccattaataaagtaaacacatgtggacatgaatgtgtatgaaaaccctactaaagtctttcctattgattaccctgtcaccttcacggcaaggcatgaccacaaatctcagcaatacaagctcatcacttctggcaaagggaagagaaatgcattttcagcttttctaaatgaacaaaataattaatgtggctgattcagattgaaaaggaggggaaaaaaaaaagaaaaaaaaaaaaccactgcccaagaatgagtaagagtgctgtggattgagctgcagccaagggctctaggcttgccatgcacactgcctgtgggggagccagatgcagaaggaagtgacgatgcactggggtgggggcaggagcgccaggtacaaatctgtgggatgggaagtagaaagatggacaaggtcggccaccctcccagtggttatggggacagggaaggcaaacggaccaggtgctcagggaactgccttgaaacaaaacctggtcaaccaattcaagggtaaaaatgtggagcacagacacatgtgggcaatatttatggtggagtaagtctgtccccagtagtctctgtgtcccatgggggcaatgactatgaagtcacttcccttttggaagccgacctttgttagaacagaactcataccaaagtctctctggagtcctctataagccaccccctttcctacatggtgcgtgtgtgtccatgaatgtgtgtgaacatgcatgcgcgtgcacacacacgcacgcgcacacatgcacacgcacaaacacgcacacgcgcacacacgcacgcacgcacacacgcacacacaccgcctttcttcctaagtctcagctttaggagccctgactcagaggtgcgcttaccgagtttcaatagccagccttctcggtctggattgaagaaagtgtgagtgaggtcattcccgtcgtcttctgggattttaaagggttcattttttatgctctcatagagattctgggataaaagatgacaatttatgtctctgattctagaaatattttttcctcctcccctttctcttcattcattccacaagcattcatgtgcctatagtaagccaagcctgctagatgctgagactagaagattatgaccatttctgctttcaggcagctcacagtgacaaaataaataagccttcccaattaggaaaataaagaagcagcctgacttctattcaagcttttagtttcatgtttacaaaccactgtcccctccctgattccctagctgggccttactaccactttcttaatgaaattcacatggttaaacaaattaaaagaggagacccttgataaattgtatgttttttcttccttcctacaaaagacgatcctgttcccagtgaactctttcttgacttgaatgaagaccattcttccttgcttacccggaggagctcctccggcaggtctcccccatcattgatgcctcggttcatggcaatgaacctctccacagtgggcttatctttgacattggggttgtgcagactggtgttcaacatgatgatggcaaaggagaggacgtaacaagtatctaaagatgagagaaaagcaaaggggagccgttgcatgctcagatgttcagaaacatcccacccgcaagagcaagagtggtatcagatgaaatcaggaataaaaaaccatgttctcggccagatgcagtggcttacacctgtaatccctgcactttgggaggccaaggcaggcagatcatgaggtcaggagttcaagcctagcctgacccacatggtgaaaacccgtctctactaaaatacaaaaattagccaggcgtggctgcacgcgcctgtaatcccagcaacttgggaggccgaggcaggagaattgcttgaacctgggaggcagagcttgcagtgagccgagatagcgccactgcactccagcctgggcgacagagtgagactccatctcagaaaaaaaaaaaaaaacatgttctcaaaagaatgagatgaatccacatgtacgggtacactccagggcacactgctgtctgaaaggagcaaggcacgaaaaagtatataaagtattcaagacttaaagctgtttattttttcagattggaaaggagaatacacacactgtagaaactctgaaaaacacaatgtgtttaaaacaaaatgacctgtaatgacccataatcccactatctagcaataatttattttgctttatttcctctacgtaaatatgactatgtataactcaccacatatttatctcacagatatatactgtaacaaaactggaaacaaacaaatacatacacatgcttttttgctaatcttaatatcattctcctatgtcaataaaaattctttgtaacaatatgggtttctttagtttttgttttgagacagggtctcactctgtcacccaggcttggagtgctgtggtgcaatcatagctcactgcgtgtagtcgtaaactcttgggctcaagagatcctcctgcctcagcctcacaaatagccgggactacaggcataagccaccacacctggctaatttttaaaaatttttttggagaaagggtctcataatgttgcccaggctggtctcaaactcctagcctcaagcaatcctctcacctcggcctcccacccaaggtgctgacattaccagtgtgagccactgcatgcagctaaaacatggtttttaatagctgtgtatttcgtagttcagaggtaccacaatttaaattcatagtgccttaatgtcagactttcaggttatttccaacattttactattataactatcattgagtaaacgttcctaggcatgaatctcagcccttttgttttagaaattatctggtgccaagaaaataatccagtgtaaaacgcccatcataaactaggatgaatgatcgtatttacccgtggactggaacacgccattattgcactgacaatatcgctgggcaaacgcctccatcatccggtcgatcttctgggcctctccgggtagccggaagctccacaggaactgcctgagtgggtaaagacagagtgttccagaacttggggaggcaatttatttctctatgaattgttaaactgccaatgattttttttttctttttttttttgagatggagtctcactctgtcacccaggctggagtgcagtggcgtgatcttggctcactgcaacctctgcctgccgggttcaggcaatcttctgcctcagcctcccgagtagccgggactacaggcacacgccaccatgcccggctaattttttgtatttttagtagagacggggtttcaccatgctggccaggctggtctcaaactcctggcctcaagtgatccacccgcctcagcctcccaaagtgctgggagtacaggtgtgagccacggtgcctgaccactgccaatgattttttaacatcaaagtgcaaagggaaccctgctgggctgcagccttctgttactgtaactctgaacagatgcaaagttgccatccacaccactgttaccttaatcaaaagtaaaatttttcttaggaaaaagtgaaaaattaggagggaaacaatccctactgaggagtggtttccctcctcagaataatatacaagactgaaacatagataatgctcattttaaacaaacgctatttccggaaacaatatgggtggcagaaaaagagaagattgtcttgtcaaagcattaacaatcgatccctttaagtcaaagaaagaaagacccacagctgacaggtttaattgtggattgtttccatccagctaaatgatagcacaaaagatgaagtcattatttacacctacagcagtgaaaatacagaatgacagtttcttaaaaggcatgaggtaacagatttaataaaaaattaaggtttacttttttctttccaaaatgaaatgtataactacttattccagggcaagaaattaaaggattttctaaactgaaaaatttcaaaatttaagtattcatcaatttctaaaacctcaaatataagactcaaggaagagtgttacagaatcggcctccagaacgtaacagaattgaattccccttgaccatccagtcattcccagtcagagaccaatagatttcttccctccaaaatacttcaaaatattcaaatcatacccaaagatataatttcaataaaatgccccccaggacagactcatgatcaaaggctagcctcccactccttccaaaggggctcacctcaagaatactcaccgtagtgcctggacgagattaagatcagtgaactcatgcagctccacaaatgcatgaagaacctggatattaaactcatctctatcgagaaaagacaaaaaatgggagagaaagcaggagtcaggcaccaacactgagaatctccagccaggccatgtctcctacactgcgtcctgtggtcctgtggctcctgcccagacagccacttgtgcacactgtccgcaagaagactggctagctctgctgactggctgaacaagcaagatgtctccatgacccccagaaaagacccatcactattccccagaaaagcctcccctcaactccagtggggctacagatgctttaaggcaaaaacccctccaagaacttcagagtatttgggagtttgtttctttgtgtcgttcctgaacagccttccctagcatgcgcataatccccaaggccttacctctcccctaggtagtcgccgatggctgtcttgttgagcccttcgcctttatataagaactgggcaatgtcttcacaagtgttcttcaggaggtcgttctctattaagaactggatcccctagaaaaagacaacaaagacgccaatgatgctttgctgggaaacagttgaaaagaaggggaaagggcacaggaagaaatgggtgtgggtgcactggaatatttaataaatacttgctaagtgacctataaagccggggagtcacagtttaggaacaagggcttagtgcataacatttgctctacaaaacggcaacatgaactgtaacgcttggaaaaaaacgtttttagggtctatctgagcactataaaaaaaccccatctaatatggaccacttcccgcttctttctcacttacctttttagggtccatattaaattttttcctgcccatggctacctgtttgttcctctgcatgtttttcctgtaaaacaaccatcacagccattttagtacttcaggccatcggaaaggcttgaaagactaatatgatttccactgatttacacaggtttttgaaagatttatccaggaaagcaacaggcataatctggtggaactatgaaaggccaactgaaacctgaagcctgaacctggctccaagctccaagctcatttgctccttctaccctggaacagaggttttctttatttttttttgagacagggtctctctctgtctgaaggctgaagtgcagtggtgctatctcggctcattgcaacctctgcctcctgggctcaagtgatcctcccacctcagcctcccaagtagctgggaccacaggcgcatgccaccatgctcactgtgttgcccaggctagtctcaaactcttgggctcaaatgatctgcctgcgtcagcctcccaaagtgctgggattacaggcataagccactgtacccagccagttttctttttttaacatgatttttaaaaaaactttatcagggtaggccgggcacagtggctcatgcctgtaatcccagcactttgggaggccgaggtgggtggatcacaaggtcaggagttcaagaccagcccagccaacatggtgaaaccctgtctctactaaaaatacaaaaattagccaggcatggtggtgggcacctgtaatcccagctactcgggaggctgaagcaggagaatcacttgaatttgggagttggaggttggagtgagtggagatccaccactgcactctagcccgggtgacagagtgagactccgtctccaaaaaaaaaaaaaaaaaaaaaaaactttatcagggtataatttacttataatactcctactgtaggtacatatttgaatttttagtatacttactaagttgtgcaacatcaccataatccagttttagaacattttcatctcccctacagaattcctcacacctttttacagttaatccttacttctacctccatccccaggcaactattaatctattgtctgtctccacagatttgcctattctggacatatcatacaaacagaatcataaaagatgtggattttcagatctggcttctttcattagcataatgttgtcaaggtcatggtgctggagcgtgggccagtactacatgccttcttgctgctgggtcatcttccatggtatggataaaccacatctgtttatccattcaccagatgatggacacttaggctgtttacagtttgggacaattatgcagaaggctgctatcagcatttgcatatatgtctttgtgtggacacgttttcattttccttgggtagatacccaggggtggacactgctgggtcatacggtacatctgtatttaactttttaagaagttgctaaataataggcagttttcttgactgtatcagaatgaaaaatgcagattcacagaccaagcttctcaaagtctggtccaccaaccagcagccttgggagcatatcagacgtgaagacgctccgctcgtttatacatacacgtcacctggggcctcaacaaaacagattctgactctatgtctgagaaggggcctgtgcttctgctgtatgtttaacatgatcccatgtgtggagtctgagtagcaaggccctggaccggctgagtaactcagaagtacaaggggcagaacctaggaatttgaatttttaaaacctcctgcagtaattctggtatgcacccaaatttaagaaccactgccatcaatatcaatagtaattttataatctccgagagcaaaaaagttgctcggaaataaaatcataaaatgttattgccttaaagaacacatgtgttctctagctaaatccatggagggaagaaaatattcctaagtgttttgagggttggtgttttttgtgtttttgtttttgttacaggcagggtcttgctctgtcacccaggctggagtacagtggtgtgactgtggctcaccgcaacctttaactcctgagctcaagtgatcctccggcctcagcctcctgagtaactaggactacaagcagatactaccacaactggctactttttaaaatattttgtagagacagagtcttgctatgtaacccaggctggtcttaaactcctggcctcaagcaatcctcctaccttggcctcccaaaatgctggtattataggcatgagtcatcgcatccaggctgttttgaccttttgaaaggaacacctgaaaactgtgagtagtatcagaacttccaggtgtaagataatctgggctcccctgtcaacagctgccttaggaaacaaagtcatgggggaaacaccatttaatttcagccagaatgaagggttatgaccaggtatctagaaattcctatttaactaaaatgattgtctaatcatttttttctaaatccaggaagattactttgatcagtatttccaaacaaataccacaaggaaggcctgtttcatggtttccagtgtaagtggtgaggcagcgtcagaggtgcccacagaagcaaggggtgaaactcctgggaatgctcagcttcctgggcctcagtccagtcctcaccaaaggctttcctgcagccaccagaacgcacactcccagatatccgccagtcacagtctgtgccacatgactgcctgggacacacaccagagatggctccctaatttcattagctagccagctcacttctctatctgccccacttggagcccctatagctctaggccttaggcagctacttctctaagtggctttccccagcctacacaggtctgacaccccagttaaggtgtccaaaggaaaacagcttactgctactggatcgccttagttaactgacgcgtatacatttcagaaagtgaaatcctgtactacatgagtatattatttctgcttgattaaatagtatttaggatcattcctacaaaatgcatcagatcgtcgatgagaaacatgaattctctcctataagaaagtccgagcaaatgtaatgcctgcttgagaaacaaatgcagggtgagcctgagtacccgtatggatggatcctcagggatgtgcagaatcacttccgtcttggcgctttcgataccggaaaaccattttaagttccagattaaaaaataataataacctaaagactacttcctgactcacaacttcagatgcagttcatgagttacaagtcttcccaaattcactggctgagtactttggatgcactcacgttcctggtgtctgcgtttccttgctgttctatggtaactgacagagaattaatcaagagaaaaacaaagggcacactgaattctgaatatgtgtgtgcagacaccggaatatacagaaaggaaacgtaccaaaatatgaatcctgattatctctgggataagtgtttatgagaaatttgttttttatacttttctgtattttaccaattttctgcagtaaaggtgtattacctttatagtcagaaaaaagccatttttttttacatttttaagatcgaggtaaaatttacatttaacaaaatgcacacaccttaagtgcacagttcaatttgttttgatgagtgcatatacccttgaagcaccactcagattaatacagaatattcctgccatccctgtaagttccctatggcccttcctagtcaaccccaccccaccccgccccagcaaccacctcggaggcagcactgtcatgatttcggctagcacactagcacagcttagtttgcatgttctagatgctcacgcatggaagcacacggtgcccacagtttctttcactcatcacaatgttcgtgagattcatccgtgctgctgcacgctagcagttcattccttcacactgctgagtaatagtctattacctcgacctgtttatccagtcacctgctggcagccattcagggtatttccagcttttggttattttatataagaatgctatagatattcttgtacaagtctttgtatggacatgttttcatttctcttaagtaactaggagttgaattgctgatgaaactgccaaacttctttcccaaatggttatattattttattctcactagcacttgccaacatgaggtaccatcagtctttttaattctagccatcataggggatgtgaagtaccgtttcatggtggttttaaattacatcccctacaactaatgatgttaagcatttttcatgtgtctactacacatatggcttcttttgtaaagtgtccaagttttttgcccattttcttatttgggctgcctttctatcatatattctagatacaagtcctttttcagatatatttgttacaaatatttacttctaatctgttgcctgttcatttcttttaatagtttttaatagttttatcttttacaaaagcggaagttttaaatttttatgaagtccaacgtatccgtttcatttaagctacgagtgtttaaaatggaaagaggggaaactaatccaaaataccaaatggacaatacagagactggccgtggtgagctggctgccttctgtggaggactcagcctcactataccctgaaggcactgcccacaggagtctaaaacaacaaatcaaacagtcctacgaagccagacaggaagacttaggcttagaaaaatacagacatgtagtgaattggaaacagctcatttattgcattaagcagtcagaaaacggtctgggaaccccattcaaaactaaactctcaaagtcactaacatttcatgaaaataaaaggaaaaaaaaaagcagagtccttgtccttttatactatcatcgcatttctacattttcttcccttaagcattaggaaggtgcaaataagctcacgattatcctcagacatgactggacactccagccctttgaaatcgtatcagcagcattcattaagcttttcctttacacaaaggaaaaacagaaactttaaaatgcacaccgacagtggacaacagaggggagtaattcacataaaaatttaggagcagtttaaggctttctgggacctttgaagttctccagttcaatttttttttttttttttgagacggagtctcgctctgtcaccaggctggagtgcagtggcgcgatctcagctcactgcaacctccacctcccgggttcaagcaattctcctgcctcagcctcccgagtagctgggactacaggtgtgcaccaccacacccgtctaatttttgtattttgagtagagacagggtttcaccatgttggccaggatggtctcgatctcttgacctcgtgatccacctgcctcggcctcccaaagtgctgggattacagccgtgagccaccgcgcccggcctccagttcaattttttaaacactggaagaagctcctatgttcaggaggccttgcggtgaaggatggaaggcagacattatgggtgtgtatgtgcttgctagaattagaaagacacaaagctgactttttccttcaatgtgccacgtaagcataattaaggcctgggtgctttaaggaattacaaccacagaagccacctggcagcagggcagactcacctttcctctgtggatcccaggttttcaatttcattagctacttctgctatctcatccttcagcctctataaaacagacagtccagagtcagcaggaaaggcagatgcagatcaaattaaaacttctaaaatctcacataactccctccaaccaaaaacaaaataaagcaaaatgaaacaaaatatgacaaaaatgcaaaaagtaaattaggaaaattcatgtttcagaaatatttattgagtgcctaccaaacagtaagcattccagaaaacaccaaggtagaaaagaatacagcctctgacctcaaggagtttacggtctaggaaagtttataagcatatatgctgtgtgaaaaacaaaacctggctgcctcatcacaatctttcagaacaagtctgcagcttactaaacacaagcatgccagaaaattcagaggacaaagtctcctacccaaagcccaggctgcagagcctgcagtagctgtgccagggcaacaatgccaccaagcggctggcaaagggaatgtctgatcaaatcggctgtgcatccgcacccaccctcctcattccagcacactgttggtcagaatggatgggctctcacggggaagtggggcttaagtggagagctgcttagctttctcacgatctaccagtgaagcagaaatcaaaggatcagggagaactatcaaaatatacttaaatcaactccagagaaagtcaagtctttcctcattttgctactttgggcaacaggattccctccttaaccccactcctaatgtcttgtgaagaattctgaaagaataacatttgctgtcttagggcgaaaataatccaactattggcttctagacttatttcctacaagcttgatagttacaaaaaggaacttggaaaaattgtaattgtaaaattgctatcactaagtacatctatagggaccagaaattatgctgtctttcatgctaagtccttccaactgtgtagcaggtgttttcatgatctgacagatgaagaaactgaagttcaaggaaccggaactctcttgtctcaaatcattcagccagtaagcggcagagccagagccagggcgtgggccgagcttcgcctgaagcccacattctcattgcctctcctcatccactctgctccgcaagggcaaacacagcagagaggactactcaggagacaggagtcttgcaggctatctccagctccgacaaccgaccaactgggtgaacctggacaagccactcaacctctctgacactgcatctcctcagctgtagaggaaaggtgactgattatcaacacctacgctttgtgcagagctgtagtgagggcaggtcaaaagtgtcttgaggagacactctgcaaaggacaccctttcatacaaatggaactgtcactgtggttcttacgttggtgaaaccaccatgccactctcctacctgaatgtcagccagcagctcctgttttctccgtcggatgttctccagttcttgacgctcctctgctgtcaggtcactgggaactacaaaaatggagggcaatgttacaagaaagcttttatctcgccaaaaatcaaggaagatccagaggccacaaaaggagaaagatatcaagaaagaaactagaagtcagtttcagaaatgactgagtgatagaaatagttatggctccaattcttatcagatttctaagaaaggaaggcccttaaatcacacagaaaagctctgagaaactcttggaaggaaaaacgagagagaagagattactgaaggttaaattaggttggctatgaatgaaaaaggatgaatattagctgagcgcctggccattttcatcccttccagctgggagacttcaggctgacatttaattaatctctctaggcctcagctccctcatggtcaaaaacagagtctccgagatggaaagatgtccatgaccccctgaggtggggaggggaggcaagaggcaaagcaacgtgtacgaacaattttgtgccatctctgggaggggtttggagaaagagactatgtatgcactgagaaataaaaaaagtctagaatatacacctaaaatcagtgcttaactctgggaactgggactatgggactttctctttctgcttcatacctttcttcattgtttcgatgttttacaatgtgctcttatcatcagaagaaagttacttaattcccagatcacagctctcaccacaaaatacttctgccatcctccaatggctcaatctcccccacctataccaacaggagatttggacagacaccctctaaaatgacccttcaagcatgctatgggaagccatgtgggcaaatgagaagaacaagcattagaatcaaacaaaccaggttcaaatcctagctccaatctaccaaatatcaaattaggtcacttcagacaagttatgtaacccacttgggtcacatttcatcatcaatgaagtggtcccaccatcacccacttgataaggctgctgtgaagatgatgtagagtaattaaagtgcctcaaaccctgcctggtgctgagcagaagctcagaagtgttggctcttgttccctccatggcacagcaaagggcacccacactctcaagggtaggggtggtttgagggtccttctatccttcagtgggtgcctatgtgagcctgagctgcactgtacaatatggcggccaggagccccacgtgacattaaccacttgaaatgtcaccacccagtttgagatgtgctgtaggtaaaaaatatacaccgaggccgggcacagtggctcatgcctgtaatcccagcactttgagaggccggggcgggcagatcacgaggtcaggagaccgagaccatcctggctaacatggtgaaaccccgtcactactaaaaatacaaaaaattagctgggcgtggtggcaggtgcctgtagtcccagctactcgggaggctgaggcaggagaatggcgtaaacccgggaggtggaggttgcagtgagccgagatcccgccattgccctccagcctgggagacagtacaagactccatctcaaataaataaataaataaataaataaataaataaataaataatatatatatatacacacacacacacacacacacaccagactttctataaaaacaaaggaaaatgactttttaataatattttatattgattgcacattgatataacttaatgaaatgtattattttaattgatctcaaaggaactagtatgaaataaaagtgcatctatggctcatattatatttctagacagcatagagttggaattaacatctctgcttgagagcacagttaggatacacatactttccttctgcccatggcattaaaacttaatctactacattcacagagcagttactttccccaaatatttcataaaaatcacaagagggtagaaacaatagactacagtgaagtgtacagtgggttaattagctacattagaaaagccgacttttcctttttttttttttttaacctaggttttccccaaccttctctaaaaaagtgttttttaaacatctcaaaatccaaaataagaaaagcattttagtccaggccttgtagctcacgcctgtaatcccagcactttgggaggccaaaccaggcagactgcttgagcccattgggaccagcatggacaacatggtgaaaccctgtctctactaaaaaaaatacaaaaattagctgggcatggtggcacatgcctgtagttccagctactcggggggctgacgtagaaggattgcttgagcctggggtgcagaggttgcagtgagccaagatcgcaccactgcactccagcctgggcaacagagccagacaagaaagaaagaaggaaagaaggaaagaaggaaggaaggaagggaggaaggaagggagggaggaaggaagggaaggaggaaggaagggagggagggagggagggagggaggtaggagagagagaaagagagagagaaagagaaagaaaaagagaaagaaacagaaaaagaaaagaaatgcattttacatcatgacccaatctccaccatacataaaagtatcaaaaataatatctcaccatgtctgttatttcactgtgagctttcttaacagtggtttagtccagtaaactgattttatggctgcatgcggtggctcacacctgtaatctcagcactttgggaggccgaggtgagtagatcacctgaagtcaggagttcaagaccagcctggccaacatggtgaaaccccgtctctactaaaaatacaaaaaaaattagccaggcatggtggcaggtgcctgtaatcccagctactcaggaggctgaggcagaagaatcgcttgaagttgggaggtgaaggttgcagtgggctgagatcgtgccactgcactccagcctaggcaacaagagcacaactctgtctcaaaaataataataataataatataaaaaataaaaaataattatttcataatcaattaggtaatcgtataattacctaatatactgagtcctgtggtttgaaaaacactcttcctttagaggctggaagagacagccactctaaagatcccaacagaccaactaaatccaacccaggtcaccttcacaagagtgggccttaaactgcgtccctgagaactcaagggtgatcactcaggtgtgtgtattggaggacggagccttaaataagttcacctacacacctgctctccagtcccattcctgtgtcaagacccaggactccagctcagcaatccatcagcattatgtggattctaaccctgcacccccgccaaacccaccaccccaaatgtttcttcccaggctgaacagttctcccaacattaaaaaatatatatatatatattaaaatggctgcttcaggaaaaagtcagacaaataagtgagctctggttaaagcaaaagccgttttgaaaaacaacatcaactctactgatgcgtacaccgttctacagaaacgcatgtttaaagcagttcactctgatttttctgtgcttcacagcccagaaaaatttctagtccaagtagaagacccctttaagaaattaatttcttcaggttctagaagatacatattcattccaatataacatggttttgaaattaaggcaacattcattttttaaaaacagctgctccgcaagaggctcaataattgggatttgattttgaagctacagaactggcttaatcagatcatcaatgtatctctacccagcagaagcaagactaaatccaaggtccatataatgaagctgatgaaaaacagagcaatcgtataaaagaaattcctatctcaagactgctatataccctgagaagccaacttgtatcattctaaactggaaactctaaatcgttgctttcttttcagaatctgagcactcaaccattctgggtttaatattcacacatgacaatttttctggatggacacaatctacccagcagaagcaagactaaatccaaggtccatataatgaagctgatgaaaaacagagcaatcgtataaaagaaatccctatctcaagactgctatataccctgagaagccaacttgtatcattctaaactggaaactctaaatcgttgctttcttttcagaatctgagcactcaaccattctgggtttaatattcacacatgacaatttttctggatggacacaatctagcttctgtattataaattcaaaatgcccttctagtcctctatcttccaagatattattttttaaatagtaaaggaataggccaggcgcggtggtccacgcctgtaatcctagcactttgggaggctgagaagggtggatcacgtgaggccaggagttcaagacccgtttgaccaacaaggtgaaaccccgtctctactaaaaatacaaaaattagctgggcgtagcggtgcacacctgtaatcccagctacttgggaggctgagacaagagaatcgcttgaaccccagaggtggaggttgcagtgagccaagatggcaacgttgcactccagcctgggcaacagagcaggcctccatctcaaaaaaatttaaaaatttaaaaaaaatagtaaaggaacaaaaacatccataaacctacaatatcaaagagtacacagagaagggccatcagaagagatttcaacaaatttccagaacagagaaaggaaagaaacagtgctaagtgctaatatcttctagaataaaaactccacaaaggcagggacaccgtatgccttgtacactgttgtgtttgtggtactcagcacagggcctagcacactaaggatttcacacacacacacaaacacacacacatgaacgaagccaactttctcatgagcagacaagtgtggagctggtgtccagggtaaagcctccatatgtagacagcggacacctaagagaaccctaccccaagcaggctctggctcactcgccctgaagccaagcctccctgcccacaaggcccagccatgcacagagcttccgcttaacatgtctactgcttcactcttacacttacagagataaccacacctatgccaggagtgagaaaggacaagacagggaacagaaaactcaccctagagcaaacagagataattagggggaaaaaagaaagaaaaaaaaaacctttaaaagaacagaaaactctggaaaagggacaattacagaaaaagaatacggccttgcaaattaaacatacttttgtcccccacatcaaaaaagtcaacgaaggattaaaagataaagttggggcattcctgtagaacaaagaggtttgaaaatataagcaaacctggaaatataagcaaaaaaataaactcggttgaataaaaatatttttaaatcccacagagaaattctcataggaaaaattcagaagttccaggaataaagacgatcctaaaacctccacagaggttaaggagagtgattaatcagaccacccacgagggaagatctcgctggtgtcagtataagagcccgcacactaaagatagcgcagtggaactttcaaaattctaaatgaaaattatctgaaccccaaattctcagtcaagtaggagggtaaaacagactcatttcagatacataaggatcagaaagtttgtcttctgtgcaccccttctgaagaagctacttcaggagcaagatgtggatcaaggaacgggactgactcaggagcctgaggacagcaagcgccatcaactgtgatggccaacagccaccagaccgggtcagagcaggaagccaaagggctgccagaggaatgccatcagaaagaatgaaatcagactcgaaaccagagaatgaaggagaaagcagctgagaaaactgtgtgataccaacaggcatcattcggtttcctctcaagagaataaaaaggactgggcaacaggaaaaactcaactacaggaaatcacagaagaaatgaaacatgccccccgagtggtgtcctctgggccatcagggacgccaggaacagctccctttgagtgggcacctggctctacggtgagtggtatctacattcctgtcatggtgctggtcgctggtagttaacttacagaatcaccctgtagacaaagcatgaaagaccaacccaggctggagaagcaaagctatctgttaccaaggtgaaggaagagctgaccaaagtttgagggaagcaaagtggagagggcagcagggtcccaaatggtccccacagcttcctcctacaacactagagaccagaggcatggataaggatcatgaacaagaaacccacgctgtaaatatgccaaaggtaaaaatccaggaactgaaaattgtgatcaactaccaaaaatggacagtgagagaaggaaggaagagaatggtgtgagctgcatcctcatccatcataggcagaaggcaggagataacctttgatcttgacaaaataatcaccaatttaagaacttggcagcacccactagaagacctaaaagcagaaaaaagtgaattaatagtggctgctttggggagtgggtctgggaatagagagacaggacatataagcccctgaatacttgctttaaaatacatatatatatgtactatgacaatttgaaaacaaaagactaaaaatgtacaactatggtcactagaaaagatagcccttctgtgtccttggagtcagacagaaaacgcttctggccaatttgtagctagaataaataagacatttatctacatttattttgatccaatctcctgacatttgccacatgactgctaaattacttctccattccatacttactaactttaaatcataatgctgctccccttctggctcaaccaatcattcaagaactttattttaaaaagctgaactacacctcatttttctagtggaattttattctgagatgaggcaaaatctaatattttaataagtattttcctctgcataaacttaacaatgcaacatcaaatctttaattcaagccttcattctcatgctgccccggacagaaaaaacatccaaaaacaaaatgcttaatttcatttagcagcatgaagaatcaacactattgctggagagctgaggtgtgattgattcctacagtcttggctagtgtcttcaggacactgcgaaggccacagctggaacaagaaaggtggtggtcagaaatacccatgtctacctcacagcccgggagtttctgggaaagcaccgtccgcaccctgggaaacccgtctattcatgccgcttctctcctgtgtagccattagggttaaactgcaaaagaacggctcagatgggccagatggcagcacaacaaacagctcctccctcccccactgccacgtgctgcagccatgcttatgtgccagggaggcggtgtgccagggaggcggctgaaccccttgctctttaaaagaatggccactggggagggcagcaggttgtccctgccggcagcctgagcacaatggagacaaaccagagggggagccgccctgacacaccacccggtcgctcgccctcctcgcccattgccagaggggcacccggaatccatgcccacaaaggttaatctgcaaggtgtccggctggcagtcagggggacggtccagcatcagccccatcaccattcctttccagggttccaatttaatgaagaggattaaagtgacaaaaacaacaaggcgctattgtgcttggctgtgaataggaaagccacacaagggaagctttcatttatttatttatttaaatgttgctttgcagattttaacagtcggcagaaacccagagctgaaatgggttccagccagtggcatacaaaggaggactgtcttaaagggacagagccctctttccaagccagaggacgatacatgagcacacggcgggctctagtctaaaatcctgcaacccgcgctccaccggccacaggcagatgcccggggatatgccataaagttccacggaaaacgcagctctctgacagcaggttctgcttggcagacacatagcagctgccaggaccacactgtcctaaatccccgtgggtaccgtcaaatgaacgtgtccaaggcatgctttaggaccaggatgtctctttgaggtcatccagctggcaccagacccctctgcctagctttcaaatacatcacttgccttatttttttccactataatgattaaccagcatccttcttacagcctctgcctttcaatggataaaaaggtccatatttaaaccaacaatgcggggaaacattttataaagtaattaaggagtgagccctcatttgcggagaaggtaaatatacaaaaggtaactaccttagtcagagttgctcccaggccaaggaggtcattgccatttccttttcatcccctccagctggcctgctgccaacgggtgccctcctgctaatcacggccacacccctttacagacctggaagtttcataaacactgaatacacacacacacacacacacacacacacacacacacacacacacacacacgctccttctctcttaaccttaagctctgcctaaaacagcagtggcagtaatgaaataaagcacccagcttttctacagcctctacagaaactaccacctgctcagaggagaacaactggctatttacaaaccaggctttgggctcaaaagcgcgcatctgggaaaccatcttgttcctccaacctccaaagatacagtgatcatggcgtgagggctaagaaactccaaatatcctgagcactggttccagtattcagcacttactcgccacatacctgtgtcaatcctactagtcagaccttaaacaaaccagcgtgttcacctccctctgcactaccctatgggtgtaagtcactttgtctcccagaaaatcccagtgacttataatttgaaaaacttcaaaatactggaaacaactcaggctttggagacataccaatgttcaacaaactgctaatctctctgggcctcagttttgtccagctgtaaaatggcactgcagttattagcactgttgtgaggaatgcgtgatggaaaagataaagctgtgagcacaaataggtgcccaacaaatgccaaatgtctttcctttatctgcatacccaattcatcttcctcttttgcttctttctaacaatgtcatcattgacgcattcagcctgcatttactgcttgcctactaggtggaaggcagcgggggtacaacactgaagagacagatctggttccttccggcaggagcagcagtccctggaagcatccactgagaaggtgatgacttcaggtgtgcatgttaacgagggatcatgcacaaggctgtatgaatccacagcatgggtgcctcacccaacttctgggacggatccggggactgccactctacagggagtggtcttgggtcctaagcctagcttggggccacactcaccagctggatgaccctgggcaagttacttcggctatctgtgcctcaaagcaaacagtaagctaagaggttgcttcctgagcagagtactgtttaaaatgactacagcttttatatcacttggggaacatacaaatgacccacaataatacaaaatctggtaagttaaaaactataggataagaaggcagtgctgtgaggcatggctaacaactgcaggtaaggcagcaaacaagaaaaaaaaacagtcgaggagtcaaagataaagttcttacagatcattactgcaagtggagaatggcttggtttaggggaacttttttcccctcactgagaaaagtaattttcaactttcacaaaactccatgctgacattacaaatatgtggggtcagatctttaaggcagggataagaatgcaaccaaaatccagtgtatctttcaggtaaaatgtaacggaagagagatgtaaagcaaacagttgtaatgataccaggattttactggaagcctgaaattttgagacagtcctcaggataaatgttaggatcagaggatgaagaaagatggatgtagcaaaggggtgtgactagagcaggaggcccaggtgacactttctgccaataatacactgaagagttcacaccttcacacagtctatctactttgggaaaccaattaagtttcccactcactgagtcagaaacacagtaatacttttcaaacttagtaccttaaaaaggaaggaaattctgatgtatgctacaacacggatgaacctggaggacattaagccagttgcaaaagggcaaatactgaaggattccactgataagaggcccctggagtagtcaaactaccatagagacagacagtgggatggatgttgccaggggctggggagagggggagtgggagaatgaaggtttaatggcgggtttcagttttgcaagatgaaaaagttctagagactggattgcacaataatatgaacgtatgaatgtactactgaacttaacaggctgaagatggtacattttttgttatatgtattttaccaccattaaaaataaaggcctggcatggtggctcatgcctataatacccccggcactttgatttgtttttttatttgtttgtttttgagatggagtcttgctctgtcacccaggctggagtgcactgccgcaacctcagctcactgcaacctctgcctcctgggttcatgcaattctcctgcctcagcctccccaatagataggactacaggtgcctgccaccacgcccagctaatttttgtatttttagtagagacggggtttcaccatgttggccaggctggtctcaaactcctgacctcaggtgatcagcctgcttcagcctcccaaagtgctggaattacaggcgtgagccatcgcacccagccatccccagcactttgagaggctgagggagggagatggcttgagctcaggagtttgagaccagcctgggtgacatggcaaaacctcatctctacaaaaaatacaaaagttagccacatgtggtggcacgcacttgtagtcccagctacttaggaggctgaggtgcgaggaccgcgtaagccctggaatgtggaggttgcagtgagcccaggttgcaccactgcatccagcctgggcgacagagaaagaccctctctcaaaaaaataaaaatataaaataaacaaaaatttcacagcatattctaacttctctgtctgcttaccttagttcctttcccaagaaactatgatttgacttttgcgtagtgcattttaaaataagtatctcaccaccaatttgcagcctaagagatttgttaaaagaatttacaactgggtgtggtggctcacgccttgtaatcccagcactttggggggccgaggcaggtggatcacctgaggtcaggtgttcaagaccagcctggccaacgtggtgaaaccctgtctctactaaaaatacaaaaattagccaggcgtggtggcatgcagctgtagtcccagctacttgggaggctggggcaagaaaatcgcttgaatttgggagacagaggttgcagtgagccgagatcgggccattgcactccagctcgggcgacagagcaagactccgtctcaaaaaataaaaataaaaaaatttacacacactacccaggaccaaaaagagttaaattagcaggcagctagcagaaatggtattcaacatagaggcagaggtgccttccggcaaattgccaatatgaatatttagactattctaatttaaatttcttccatgcaaaaactacccagtttccccactaacagtaaatctattaaaggcttttattactgcattctgcattttcagggaagacttcggtcctcttctcagtgttggagccgtctcatctgacagctcctcacgttcacaggcgatgctgcctgggctttcactcactactttgtgacctggagcaaacaatcacctcttccagcctcagtttcctcacttatgtaatgaggatgtcacccagcccttctcaactatcttataaaaggaaggtattggctgggcgcagtggctcacgcctgtaatcccagcactttggaaggccgaggctcgtggatcacttgaggtaaggagttcgagaccagcctgaccaacacggtgaaaaaccccatctctaccaaaaatatacaaaattagccaggcatgatagcaggtatctgtaatcccagctacttgggaggctgaggcaggagaatcgcttgaacctgggaggcggagggtgcagcgagccgagatcgcgccattgcactccagcctgggcaacaagagcaaaactccatctcacaaaacaaaaaagtaaggtatcaaaaaatttaatttaataaatcctagaactcaaagacttagcttgcatttcaaggtagtaacagaacctaagtgacaaaattttatcctgcgaatttggtttagaaaaataaagttaacatccgctttcaataaaagctaaaaactagaaaacaaccattttaagaaccttaactttttctaaaagctcacagtgacaacacctgatatagctgacatagctggggtttcccagcagcttctttctagcactccactgctgtttcgaaaggatcccagggactgggcgcagagctccacagggaagaaccattttctagccctagcctccttgagccaagtggcctgctccttcactcccagggaaagcctggagttccctcttcctccaaacaagccaaaacagcttgctcgcccctcctcccaagggggcaggctcctgtcccctgggtgaagctgccactccccgtgcctgccagctgcaaccactgtcagcttgcacagctgggccacgacaccccttccgtgtccaaaagagaggcttggtggcttggaagtcaattctctctcactttaccctcagtggctcagatctgtttgtttgctagccctttgtaatgctctgaatttttctgtacattgaaatattctccctcagtctgacagctggaaaggacccctagcattaaacgcgacgtacaattccaactccttttctatgtgtattgatggaaagaggactactcgtgcccaggaaaggttcccaagtccttaccgagtaaaacagaaactccacgggtggcaggcctagaggggagatcaccctgaatctgtcccgctgttttctgcccccctatttcaaacctcacggaagctggaccaaggaaattgactactggcatgttcctaagtctcaggcttagaagaaacgacactgaatgcctggatacctatccaaaagtgtagtggaaaaaccttcagaggagagcatagaatgcagacccaaaggacagacatgcagagagacagccacgcacacatcagctcctactgctggctgctgggtgggagaggcaggcaggcagcaacgcataatgggaaatctgctgacagggctccacacgccatccaccagcctcttacccacggtgagtcccctctcctgcggccccagtgtcctggccagccctgggcagcaacatcaaagcctcggcaggtcacagctctccacgtcagaggccatggtggctccgtgcagcgaccccacagtaccaggctgccgggagctcccacagctgtaggtgcagggagagccggagcaaggacagcatgtgtgcgccagcacagcaggggtagagaagaaggtgtccagagaaaacaaaagctgagagcaccggccctgcaggtggaaactcgctgggcccggtggggaaggctggcgcagagcgcagagatggacgcgcagagctgcagccctagcagacgctccgagtgtgtgctgctccgctcctccaggctcatttccatgaatgcagtcacagccagcccctcctactatcccccattcccggcctcccgggggggaggggaggcaccaccagcatttgcgcacaggctgcacttgctttcctctctccctcagaagcaaaagcctaatgcctgctttcactgcaagaatgccaaccttactccagatgccctctcctttctgcatggataaacaagagactggatctagggggtggatgttctgtcaccccaaaggcacaagcctagtcctttccactgccccgcatcaggtcagcaggcaaagtggcactgaccagactgctccaacaccgtcctggaggggcttcaggaggagtatcctttgctcccttcctccagggatcccatgccctccacttccacgagggacactccagccttttcaccaagaaggactcgcctcctactcagtacactcgcagccaccaatggttatttcttcaccagaggctgtggcatcgcctttgaggacacctgcctattatcaggttggaatgttaggcaagcgaaccttggggatgataatacaagatggctggtgacaagaaatatggctacagcctgaggatagcagctctcaaacctcagagggcacgagaatcaccaagggcgcctgttaaacacgcagatttgggaccccagtcccaaaagcatgaactccagagacccaggcccctaagtgacacagaatacagggttactgcagaccacacacagcttttgactaagaagggaggagatattttttaaacaattctaaaataaccaaggagagaaagtaaaagggaaatcaccgtgctagagcagggttcttcagtctgggcattactggcacagggagcaggtcactctttgtggtgggggcttccctgtgccttgcagggtgcttagctgcgtccctggcctctacccactaggtgccagcagcatccccatcccaattccccacaaccaggtttgacaaccaaaaatgtctccaggcattgctgaatgtcccctgcgggacaaaactgtcctggttaagaaccattgctctagataaacaatggaagagggggtggaaatcctaaaaacactcccataccctccctcctttccagtctcctgccgttaggaaatcagtcatggaaggcacccgcccctctgcaagccctgcctccactgccatgccatgggggttgggctggctggggaatgcaaacagacgtcctcatcaccaggcagtgccaccaggcctgacccaaataccctggctctgcgttgtatcttgtctttcaagaaacagccatagtgtgaacaattttcttttagtgtcaagagagtagtacttatttaaaagaatcatactaagtccatgaaaaacaaattctaaaattctacattctacaaaatgtatattgagagtcccagtgcaacacgtccctgggcccctgtcttcctccttctcactgtctagtaagccatcccacctctcctcccagtccaaggaagattccactttcccgggatccaccagagtactcagttacatctctttgcttctttcttcttgttcagaagctcatcctcaccatccgccatccgtcgagtcttacctcctacagggagaactcagattcctccagccatgctccctgctcagtttacccatattaaccatcacctgatgaccttctttatcacttggtaaataaccaggtgataaattacgtgatacaaacaaactcagtgaagacagcctggactatccacgctggttatctaccaccatgtttcccagggatttcatgtgagattaagctcttgcttttcagtaatatcttgtactgtaaatattctcatagcacttttcatagtcctaagggctgtcttattttgaggtgacatcactggtttttacacaaatacacatatacacatacacactctcttcagggattgaaagagcccagcaggtgagttctgacccgtgactctctacagaagactcagtcatcatgtgcaaggctcactatgactctctctttaacatggccagcttccactacgccgacagagtggatcacagccggggtttacctgtggtgtgtgaacctaggcaaaggctttagcttgacccaggccagagactgcaggtggcaaaaacctgcactttcagttaattctaggcacagacaacatgagaaaaggatgtcagtggacaaagaagttacaagaaaagctgcaaccaagaagtctacagtgtggccctcctcatatctgaacaaaacagatgccacaatatataccacacaatcaagcttatgaaaccacatccatcagagagaatcacaggaaacgactggccacagaataggaatctcaggaccaacagaaaacatgaacgttttaaaaaataatttctcagactcataattcaacagtctttttttttttttttttttgagacggtgtcttgctctgtcacccaggctggagtgcagtggcgcgatctcggctcactgcaagctctgtctcccaggttcacgccattctcctgcctcagccaccctagcagctgggactacaggcacccgctaccacgcctggctaatttttttgtatttttagtagagacaggttttcaccattagccaggatggtctcgatctcctgaccttgtgatctgcccgcctcagcctcccaaagtgctaggattacaggcgtgagccaccgcgcccggcctcaacaatcttttaaaaagttcactgcatggaaacgaggccccctgtcagttactgtggaagaggccccctgtcagttactgtggaagacacaatgctgaaaagacatggtttcggccctccaagagctcatgtgttactattccttttaaagaaaaaagaaacaggcagcccgtaaatgccaaataaatgctgtctgcaaggtgctatgcggagtggggctcagagaagagcagggcccaggttagtccaagacggttccacgcgagagcctgggagagggcagtccaggcagaggtggaaagggcaacacaagggacagagtctggaagagcaagctccaggcagactgtggtgcctttgaatttgacaccgagacaggtggattctattctgctgttgagttgggcgagagataaagaagctcttctggaagagcaagaagcggcagccaggcgccatgagaaagaaaagggactggaagctttgcgtagtcttcactgcaccgcggtctgcactcctgttcagaagcggtagcaaagaaataagtggttttttgccctactccaactcacaccttcaactaccatccttatccagcactaattccccaaaccactactgacttcccatcctctttccagttctctctctcaggctcaaggacaggtgcaaccagaaagtgaccctctgacaagcgtgcaagggcaatgtgcatcaatcattttatttctaaagcggaaaatgaggcacaaggaatacattcaaatctcgcagtttcatcagcatcccaaacccacgaattcacaatgctgctcaaaggtcctctctgcccatgaggcgtccccaaaccccaaatcacctgggccacaggctccaagcaccacagacatgataagcataaagcttttaggcgagtcagcattctcaatctcccctccttctgtgtcccatgaaaacagaggcctggggttttttttacttttttctttaaattctattccactccttacacttaaaaatgcctcattattctttagtaaatgctaggagcataaaatcttcttcaaagaagcaaaaactggcatctgttcctgctctgagaagtccttgaagatctcttgaaaggaaggtcatttctacctgcacctcaaaatagaaacaaactggctccctgttccagacatcacccttaccagagttgccccgagtccgggtttgcaaaagtttgggagaggtgtaagaaggagctgactagggcaccagccttccaagtcgcgggaaggtccaggatactggccccctgcctccacctaccagcagggcaaggctggagcaggcacggccgacccaagcctcctggcgagtgcatccttctggtgccaactcagtgtgttaggagggcaggcttcttcttctctgtcttggctgctctcatgaggctgctcttggaccgtcccctatctcctgcccatgcagggggcagaactgtaggaggaagaaagacgagacctatggcaggggcagccaaggagagcagtgaggaggagcagaaggcaggccaagctctgcacctttgagatccagggcagcacacccactccagaactagctgaagaggtgctgacccatgagagggcagtgagtccctgatatcatgcaggtgtcctatggcctccctccacgacaaatggatgcccacctctaggtggcacgatatagtcagtttctctggacaaactctattctaccccaaacactggtaaatcctccccaagccaggctggttcctgcagcagggccagcctctcatctagacaggaaaaagaaacatggaaaacaaaggggacctgagcaaaggtagaaagaccccagtaatcaaagttctcgtacatacaccacgatgtttaaaaacattatttacgccgggtgcagtggctcactcctgtaattccagcacttttgggggccgaggtgggtggatcacttgaggtcaggagtttgagaccagcctgaccaacatggtgaaaccccatctctactaaaaatacaaaattagccaggtgtggtggcacatgcctgtaatccctgctacttgggaggctggtattacaagagaatcacttgaaccagggaggcagaggttgcagtgagccaagaccacgccattgcactccagcctgggtaatgagagcgaaactccatctcaaaaaaaaaaaaattatttacattaccaacatgatgtttacagaaatataataaaaaggatattaaacttcacatgggaaaaaatatatatgacaatagtcagaaaaatatgaaagggagaaagggtaacgtgagggtgtagctacctgagattaaagcacgtgaggctttggtaattgaaactgcaacggaagaaaaagaccagaaaacaaactcaagaaatactgaaacacacacgtagcactttgaatcggtaaagaaaaataggattattcagtcaagggtgctgagcaaataaatagccagctagccatttgggataaaactaagctgaaatgaattctagcttaatcaaagatgttaatgtaaaataaaacctgaataattctagaatagagcatgaattagtatagtcataatattggtgagtctgctcatttgcgacatgaaaatgaaaagcttctgagtgaaaaataatatcccataagctaaaaggtaaacaactaggacaataaattcacaaaacatatgacaaagggttaatatctttttttaaattaattaacttattatttttagagagagggtctcactctgtacccaggctggagtgcagtggtgtgatcatagctcactgcagcctcaaactcctggcctcaagcgatactcccacctcagcctccagaatagctgggactataagtatgtgccacacctggctagggttaatttatttaagtcacaaagaaagcagcataaaaattagtaaagcaaagatgaatacaatgagcaaaggatataaaagacagattacaaaaagagaaatacaaatggtcacacagaagaagatgctcacagtcactatgtgtttaatgcaaattaaaacatgaataacataccattttccattagtctggcaggaatcagaatgccagatgagacgaaatactgtcaggggagtgggctacacaggcagtctcccgtgctgctgggagagtgtaaactggtacaaccttttggcactagcaaaacataaagagcacacaccttttgatttgatttgaatcaaacttatgaatttgattcttaaattccacttaagagtggatatgctccccaaattccaaaaattttaaactacctaaaaactacttggtaatttaaaagaatgaggtgatttgtaaatgctaacatgaaaagatctctaagacacatctggtgaaacaggatggcacagaataccttctcacaagtaacacctacgcttgctaaacacacagggagcttctgagaaggacacacttgaaactgctagcaggaatcacctttcaaagcaaggactgtggaaagagagtgggggaggcctggactcttcctcttctgcctatctgtatatctggatccacaactaacacaaaatttgatgttgaagtttttattcaaagaaaatacagaaatgcccccagccacttatatttgctcagactggcccaatatttctattatagaagaaacatccttggattctgttttaatgcccatgaagtgcctgttgtaactacacccattctgctgtgatttcgtatgtggtctctcgtctgaattctgtgactcagaatcccaattcttcacagaaaacacaaagggaaagagactttagacaccagaaggaaaggcgtcaatagtcactgactaggccgggcgcggtgtctcacgcctttaatcccagcactttgggaggctgagatgggcggatcacgaggtcaggagatcaacaccatcctggctaacacggtgaaaccccatctctactaaaaatacaaaaaaaaaaaaaaaaaaaattagccgggcatggtggcgggtgcctgtagtcccagctattctggaagctgaggcaggagaatggtgtgaactcgggaggcagagcttgcagtgagccgagatcacgccactgcactccagcctgggcgacagcgagactccgtctcaaaaaaaaaacaacagtcactgactcaaaaaaagaaattcactgcatctttttttaggtcagaaattgagcttccatgattcctctgtagaggaaggaagaacatgatacaagttacgaaattattattattatttttttgtttttgagatggagtctcgctctgtcgcccaggctggagtgcagtggtgcaatctcagctcactgcaagctccgcctcctgggttcacgccgttctcctgcctcagccacccgagtggctgggactacaggcgcccgccaccacgcccggctaattttttgtatttttagtagagatggggtttcaccgtgttagccaggaaggtctcgatctcctgaccttgtgatctgcctgcctcggcctcccaaagtgctgggattacaggtgtgagccaccgcgctcggcacgaaattatcttcttaaggaagaagtgaatgtgctagggaaagtcctcacacaccagctgatctacaggaaagcagaatttgacttttctgtctccatttttcccctagtgtattacctagggctacagaatcaacgcatcacatagtcaggagaaaaacaaaaaggtaacttggaatatatgaaggcaggagatcagcataactcaacagtggctgttgaaacttaaaatcctggctgatttggactcagttttcagagtccttcccaggagccacagcaatggctttcatttgcagaactgaccagggctagactagataacttctaaggcacctcatggctttaagagtctgtgattacactactgttagtgactctgtcccaggtaattacttaatggctccagccgtaacacaaaacccatatgaattccccacaagttaaagttcttctgaaggtaaacaggagaagatggtggcagttttaagagtccttttctaaaaaggaaatctcgtcgggcgcggtggttcacgcctgtaatcccagcactttgggaggccgaggtgggcagatcacgaggtcaggagatcgagaccatcctagctaacacggtgaaaccccgtctctactaaaaatacaaaaaatagccgggagtggtggcgggcgcctgtagtcccagctacttgggaggctgaggcaggagaatggcgtgaacccgggaggcgaagcttgcagtgagctgagatagtgccactgcactccagcctgggcgacagcgagactccgtctcaaaaaaaaaaaaaaaacaaaaaaaaacaaataaaaaggaaatctcagctaggctgaaaacagaaagaaaggcagagacaagaacactataaatccagtaaagttgcctttgcaggattatcaaaatccaagggaaaaatgagagatggatactactaaaaatttccaggaggtctagcccagcatctctgatttaaccagcagtaaactgcatgcaggttctgtcagcctgcagccacacacaggttcctgcgaaccctcctgaagcacagggaggggtggatgaaaacgggaatctctgctgtttcctagggccactcctgctccaactctacctcctatctgcatctacagtccctgactttgtcctcccttcggctgaccacgctgcaggctgataaaggctcttaatgcccagacctgtgcctaccaagacctaagatacctgccttttctctccaccgatactgacatcttagaaaattccacctgttgccttccacatccctcctgtctaatcagactttgggtcttgatcccccacagccagtcctgtgctttcatattccataatgaagagaaaacttgggaggctacacaaagactcagataatggataagggtcagctttcttcagaggggcagaatccaagcccttgtttctattcaccttcattaagaagaaagggcagttctaatcctctgtgtaataccgtgagcattcatctctggtgtactcaacaggaaagcctataaaattcaaaccagagtgaatcctcttcaaaacttgtcacagcagatggtgatacaggtttcttgctatgatgtgtgctttgtacaatgccaaacatgctcctgcttaaaaataaagatgtaaccatttctgattctgcaaaatacaaaatccataaggaagggagtgagaaatatctagggggatatgaattgatagttacagcacctcaggtcttcctgcaaacaccacaacctgagcaacttgtccaactagagactaccacaatcacatggcacgcattaaaacatgggataaccaccgggcgcggtggctcccgcctgtaatcccagcactgtgggaggccaagacaggtagatcacgaggtcaagagatagaggccatcctggccaacatggtgaaaccctgtctctactaaaaatacaaaaattagccgggcgtggtggtacgttcctgtagtcccagctactcgggagcctgaggcaggagaatcacttgaacccgggaggcagaagttgcagtgagccaagatcacgcccagcctggcaacagagtgagactccatctcaaaaaaaaaaaaaaaaaaaaaaaaaaaaaaggataacatggaaagttcacgtcaaggacagcattttagaagcaatctgaaaatccagtgtcccactgaggaagcctatacttcattctatttggcatattttcctacaaataatactagtttatacacacatgctatcttacagcttaaaatgttttctcatttccacttttttaaattttccaacaaagctcaactgtaactctgcatatttcctgacaatgaactatacactgttctcatcagtttacaggtaagataaagactcaatgagtacaaataatctacctcgggtacactaccaatagagcccaattcacattccggtcaccggctgcatcctcagctcttttttttttctcttactgaaatacacagattcacttcagctcagcgtttactgagcatctgccataggcgcagcctgtgcttggagctgggatttaaacagctccagtccctggcctgcacagaaagtgaaggccagtggggacaggcatgtaagcccgtagcagcagcacacccggccacagcggccaagtgcagcaagtactcacagaattccaggcgatgccaagaggcttcagaggggccaacctgtgagccagaacttgaaggaccaacggattccccagatggacaagaacagaatggtgtataccaagcaagataaagtgtatggaagtgacagaggccagcaacaatgggcacaccacagggcaaggcccaggacacagcagggctgaactggcaccctgaagggggcttagtgtctgcctgtgaagggcctcaggtcccacaccaaagattttggaatctatcccaaagagatgccaaagagagagttcaaaggcaaatcaaggccgggcacagtggttcacgcctgtaatcccagcactttgggaggccaaggtgggtggatcacatgaggtcaggagttcaacacaagcctggccaacatggtgaaacctcgtctctgcaaaaaatacaaaaattagccgggtgtggtggcatgcacctgcagtcccagctactcaggaggctgaggcaggagaatcgcttgaacccaggaggcagaggttgcagtgagccaagattgcactccagcctcggcaacagagcgagactctgtctcaaaaaaaaaaaggcaaatcaagggggactgacattaacaagattaaatagctaaaaataataataacttatggcagttaagaaaatagtgcccaattaattaaactggttaattctcactaacacacatatacagaatgaaaactgacgaatgtatgtaccaatgtaccaatgtaccaggtaaaaaaaagctttttttttttttttttttttttttagagacaaagtctcactctgtcacccaggctggagtgcagtggtacgatttcggctcaacgcaacctcagcctcctgggttcaagctattctcctgcctcagcctccaagtagctgggattacgggctcctgccaccacacccggctaatttttgtatttttagtagagacagggtttcaccatgttggctaggttggtctggaactcctgacctcaggtgatccgcctgcctgggcctcccaaagtgctgggattatcagtgtgagccatcgcgcccagccagaaagcaatatttttaacctaaaaattgtgggtttgagattaatgcagcagaagagtctgacttccttaaagaatattttcaaaaacccccacataccctttcttaggcgtgttctttagggcgtaagtctagttaaaagcagctctatggaaagcataactgactcttaacttctgccctcccctgggatctcagggacctgccagaggaaactccatttgtccccctccttttacacctacctaaatgccactctgtctctcacggcaatgtctaagggcatctattttagcagtggtttaaagggcaacactgccttcagtcccaggtgacaacacaaggaaataccatgggagggggtaagggaagcgaagaagcaccagttctttaaggttacttggtcaaagcaaagctgttcagtaattctacctctaagctcccggcccctaacctcatgccccacccccatcactcccactgttgattagggtagttcatgttgacttttgaagcctccaggataaaaagtgactattacacagcacctccggtgggtctgaagctaggctcacccggaaggaccagaagcaagtaagcgtgagggaccatggccaggcccggctcactcctgctgtcccagcatagtcactagtgtcctcttccactctcaaaagtgttccctttggaactagatcttggctagtgtggactcacctttcagttagaaaagcaccaagcaggcagttcagccctggcctggcacgtcccctcactactgacccctcttcagatacagaagtatcgttatggacacctgtgcatgcttccctcccagcgtcccccacgcgtgctgcagctttcagtgtcgcccgtggacactgtccaggatcatttgcacttagaggtggggctttcaaatgtgctttatagtgaaccagagtgggaaaagcctaaagaggacacccaagttttattacaactttcacaaaatccacttgaaacatagccagatatttattccaaacttaaaaatatcacacattaccagctacaacccagtacgcattttactattttgtcttgcagcattacaacaccaccatctgataaggtgccacaataaaatacaataaaacacacacacatccacaaacacaactcctgtgttgacccagggctttaagacacagctcttcagcagaatctcttgggatttagaaggcacagcttgtcatcccattactcatagctccactgtttacagtacaggtgtggagcagataaaggaagttctacagaccctgccctcccaggcttcaaacagtcctcacctaacaaccaaagggagaagaccacatcgtcttttcccttagacacattttatttaacaaaacaagtactatttatcccaaatctcactggttctttcaatccgatctctaatgtctttactttttagtatcagattctttctggatatttgtggaattcccagaagttctgaccaactgttattttgatacaggaagtagacacaatcaccaagtatgaagtggaatctaccaagaaacacccaaggcggaactctaacgaaagcaaagattggaggagaacttctttggtttaaaaacactgagttaccttaatatctctctctcttctcgctctttctctctctctcctctctctcactctctgacacacacacacatacacacacacacacccgagagagcctcagcttcctaaccactaagagactatgcagtctttctcctgaaaacagtaagataaaaaccagagtctaggttggtccttaactcctccccaaaaggctcagtaaactatcctcacaggatttcacatactaatgaaaagagatacctaaaactccactccatataccccaagccgcatcagtcccggccgggggctgcggctttgactcaccgtcctcctcttcggttttaaggaccatcttgtttccttacagcgggacacgaaaagtccgttctgtgcttccaggagagcggtaacttactgggagccaagttttcctgtggggtctgactgggaggggccggggatacctgtgaagctgtccagccactagggcagctcagagctgcttcctgaacagacaggcaatggctggctgcacgcctgggccaatcaacctccagcctccaaagaagcggcactcccagtcagtgccaccacccagttcctgaagtcgagctcaagcaccttccgagtgtgttaaccatctgcttccctgaaagcaatcttacactggagtcaaactagtttagtagccacacttctagtcttttctcaaactcaaccaaagtcatagccaggactcactgctgtttttctcttcactttcaagtacagttgtcccttggtatccaagggggactggtgccaggaactccgatggacaccaaaacccacggatgcttgagtccttaattatttgcacataagctacacaaatccactcatatactttaaatcatctctagattacttctaataccaaatacaatgtaactgctatgtaaacagctgttatgctatattgtttaaagaaaatgaaaagaaaaaagtctgtatgtattcagtacaggtgtgacctttttttattttccaaatattttccatccacaataggttaaatccatggatggggagcccatggaaagccgactacattttcttaaaatggaatcattaaaatccctggtcccctcacaatgagataatagcccatttcccaagagcatgactaagagatcgtaatcattacagcatgttatgaggtcacaggctaaaagcagaaagcagatattagaggcaaaaaaaaaaaaaaaatccaagggccaaactcccaatctaagttcagtttcatctccattatgatttctaatatgctgcacccaaagattcttgcctgcacagtcctatcatgttcatgacacatattcattgttgaagattagaaaatagtaacaaggaaaaaaaacaccttaatcctatcaccaagagatagccattggtgacattttggtagacattttccagacttttgttataagtattatatatattctctctctcttctatagatacacacacacacacacacacacacacgatattttatatgtcgttttatagctacttatttttacttataacattttttcatgactgtaaatggacatctatcacatttattattcttctcagtctagacataatatttaaccagtcccatattgtaagacttctaagtgatttccaattcttctacgtatctcaatacacgtgtgcacacgtttcggcacatctctttaattatctccatagaaaaaaattctcacaagtagaactgctggatccagacatagcttcccacctcatcatcgtaatagataacatttattgcatgcttactctgtgcctagcttgatgtgacctaactcatctaatcctgaaaacatcccatggggtgagtgtcctcgccatccccagatcacagatgaggatgctagcacccagagacgttgcatggcttgccaaagcacgagacctggctgcagagcccatcctccgcaccctgctctctgctggactcccaaacccctctcctattagtcttcattgtaaatgcaaacacctgcagcagctttgcaggaagtgctagactttggccaagtctcactggggagctgggaacacacacatctacagcaagacaacggggcgctgtctccagtcagactctgaaggtgctgacatgactccagggcaaagacttcatcacattctcttctttcttgcctaataacagttgaataaatacatatgcatatatttaaaaaaaaaaaacactttgttttgtagaggcaattaatataaacccaacgtgtcaccttttggtttagtatgtcaaaatcacagttgtaagtcccagcctgcaccatttcaaaacctatgtttaatgattcccaaacagcatttctatcttctggtatcaggtctgattcacagccagtgatcccaacttgtaagagggcaggtcacttctattttctccctactgtcaaatggtatagcgtttctctggaatagacacccaaaggcagaaaagctggtcatgaggcctgagtacttaaagctttcacagatgctgccaaagtgcttgccacgtccctgatgggaccaaacttaacttctgccagtcagacagtgggaaacggtttctcgttgttgttggtcatttgcactgacctgattactgatgatgctgattatcttttcgtaagtttgaggtatttcctctttcatgaattgctttttcaaagcctttgcccacctttctattgcttatcattttttaaatgatttgtagattacaaatcctttgtatgaaatgttacaaatattttgtcataaccagtcacttgtttttaaaaagtttttacaaagatagttgtatcttttgtcttatctgtttcgttcaacattcactgagcacattaagtgccagccactagtgagacatcagaggactaaagagacaaaatgcctgccctcgtggcgtctccactctaacgagatgggaaaggtggggaaacaagtaagtaaaatatgcagtatgtcagaaaataagtactgtggagtgggggaagtggaagtgcagtcagggaaggcctctgctgagaagggccaggaggctactgtggctggagcaggaagaacagtgtagggaggagtggaagatatggtcgcagaggtgaggagggtggtaggcgaactgcatggggccttggcagctattttaaggactctggtttccattctgggtgagatgcatagctgctgccagggttctgagcaacagagcattttgtggcttcctttgtaacaagaccactctggctgtggggaagaacagactggagacagccagcacaggagctggagaccagttggggggctgctatagtcatccaggtgagacgggttggcggcttacttgataaaagtggccatattcttgctatatttactttcagggtacagccaaggatgtcccaatggagtccacgtgaggtgtaaaagagagaagtcaagggtgactccgagctttctggcctggcaagtgaaagaatggagctgctatcttttcttttttttttctgagactgagtctcgctctgttgcccaggctgaagcgcagtggcgcgatctcggctcactgcaacctctgcctactgggttcaagcaattctcctgcctcagcctcccgagtggctgggattacaggtgcctgccaccatgctgagctaatttttgtatttttagtagaggcggggtttcaccatgttggccaggctggtctcgaactcctaacctcaaatgatccacccaccttggcctcccaaagtgctgagattacaggcgtgagccattgcaccaggcctggagctgctatcttctgatatgctgccaaccaggtcccccatctccactccccacagcctctgccttaaaggccccatcattccttccacccacccatggcctcacaggtcccctgctcctccagaccttttgactttgagcttctgctcccactattcaatgcctcattcttgttatacttccagttcacattctcaaaagagggactctgactggctcgtttaatagccatcatccctattgggcacagcaggccacctcataggctcctggccaggcagcgtcccttaaagctggaagcatggcaaggcatacctggctcaacaccacactgtcatctctagtacaacaattaccactgtttgttaaaaaaggaaataatgaatctcatgtctccaattccttaaaatagacatttaaccactgcatcaccaaattgtatgtttcactcactcataagtgaccatataatttatcatccatattgagatatttttgagattgcaaatgggtactattaataattacatcaggcagtcagcataaactgggattgtctctgggaaactaaaacatataataacccaactcatgaggcatatctataacatcaatcccaaacagagtgttagattactacgtatttatttaaatggaagcttttaaaaagtttcaaagtacactttaaaataactaaaaaaataatggcacattacaaaaccagaacaataatctagggcctcagagcagtgtctgaacaaatgatatcggaaacatacaggagctagcacaggccctatgaaaagcaataaatcaacaaagtagaagaaaacactcgttcgtcattcacattaaaaagcacacattaggccattttgatgcaagtgttgttgattcaagacattttatatttttaattaataaatcccttaaatagattttagcctcaccccctccagcaatagattaggtgggaatacacaagcatgtaatggtctaaaatgtttcaaaactaggctgggagttgtggttcatgtctgtaatcccagcactttgggaggccaaggtgggaggactgcttgaagccaggagttcaagaccaacctgggcaacaaagcaagatcctatttctacaaaaaaattaaataaatgacagtagaaaaaaaaacgtgaatatttatataatattctagggaaggtttgttttttgaaagcataatacccatatcaatcattatcccagagacagaaacattcctagagtgggagtgtgcagaaaggtaagataggcaccacctataaaagtgagggcagagtttagagaggacaccaaggagtaataaagccccccagactagcaacaggggcagcccccatcactgctaagtcaagacggggtgcgagggcatcatactgctgctaaaagtggcaaatgggagctctctggcaagagtgtcagtagaggattcagcaagcctcagttaccagcaggagagaatcaccttgacttcactcttctctcacccttgcgtctcctggtcaaacccaaccaggaaccacactccctccaggacagcctccggcagacagcaggatggagccggacaggaagtagagctggaggcaaaaggaaggtgtcgggtgcaaccctcaagccagatcctgggggccaggtttcccactgtcaggaaaaggaatttggaaacatgaaaagggggaaggctagaaagaaccctaaggttggaatggaattgaaggagctggtatgtttaatggttgcattatgtatatgttgtaacttacttaaccacttctactgttgggcattaatctttttctttccttatatcctgtaaaatgctgcaacatccttgtaacctttgcctcctcagctcctactagttccttaggctaaatttctctaagtgggcttaagagctggtcaaaagatacgaactactttaaggctcactatacactgctatgaaactgatttccaaaataactgttttcatttaccagctgtcttctaacatgctgccctgctgggccagtggctcatgcctataatcccaggcctttaggaggctgaggtgagaggactgactgagcccaggagtttgagactagcctgggagagaaggtgggaccctgtctctacaaaaaatgtaaaaattagctgggcgtggtggcacatgtctgtggtcccagctacttgggaggctgagacaggaagatcgcttgaatctgcaaggttgaagccacagtgagctatgattgtgctgttgcactccagcctaggcaagagtgagaccctgtctcaaaaataaataggccgggtgtgctggctcacgcctgtaattccagcactttgggaggacaaggtgggtggatcacttgaagtcaggagtttgaggccagcctagccgacatggtgaaaccctgtctctactaaaaatacaaacgttagctgggcgtggtggtgggcgcacctgtaatcccagctactcgggaggctgaggcaggagaatcacttgaacctgggaggcagaggttgcagtgagctgagatggtgccactgcactccagcctgggagacagagcaagactccatctcaataaataaataaataagtaaaataaaaaataaagtgctagcctagccacagctaaatgcacagtgtggattatcatttaaaacacacgccaactagacagacataatgtagtattttaatgtctacgcttctgtggtgtggtggtgtcagagcttctgttgtatttatttagtgtgggcatttgtcctgtgagttacttaaaagtattccttggcacttaaaaaaagtaattggaaaatgttgcgtaactatttttgtagagacagaaagatgtctatgttatactgttaaatgaaaaaatcatgtaacaaaaatgcatagactataaaaatgaaaaaagaaataagccaggaagaatatatactaaacacattaacaatcattatctctgggcggtgggatggtagagaattctcccatcatctccgtccactcaccagcccctccttctctgttctcgtccacagtacaccagactccacactggtctccagccagcagtcttactttccagcttcgctcccgtgtcatggcctctgaagctgtctacctaacacaaatcccaaatctcaaatccctgaaacatgcccaaatcctaaacgttgtgagtgccaacatgacactcaaaggaaatgctcactggagcattttggatttccagttttcaggttagggatgctctggcaagtacaatgcaggtactccaaaatccaaaaaaatactgaaatctagaacttgtctggttccaagcatttcagataagaaatactcaacccatagtcctttttgatagcagcctattcttgtttcattcatttaatatctgagactcttaagtatatactttttaaggctttcttctacatgtcccatgacctgtttccttaaactatttgctcttttgcttgctaacactgaagattttccttaagtctctagcaagcatagtctacttcttctcatttaagagtgacacactaataacctggttaaaagccgtgtggtaggcatggcctatagattgatgtgtggcaatgtaatatgataaggcagtaatgtgtagagaccccacatgtggggctcggtagcttatttttgcttagactagttacccaaagaagtattctccaatcccctacctgggctgtgtggagtgtaaaactgaccaccagtatttgtgggggctacactgaggaagaaaggatgggaatctcacagttaaatatacgggctttttcggtgctgcttcttggttggtattttttaaaataaatatagattttcactcgctctctgtatcttcacagccttcttcagaaattaaaccttcatgtttaccagaagtgcaagagaaactgccttgctgcaggagatggagaggagacctggaaatcttaactgccaacaatgaacactttcaaaccaccctcgtttccttatctccattctcagaggtgctgggtaccctgcagcctttctggaatttgggggtaaatcattttgcttcctggtatcctctctctgcagcttagacctttcctaacaagctgccaaatgggagacagcttagggcatacaatcacgcaagtgtcctccaaagtcccgaagaacatctgcaaggtggggtggagcataacaaagacttgtccagcctctgcaggcagaaatccagacacctggacacactgcacaattctttcaaaggttccttctactttggttacctaaaaaacatagaggtatactatttttgtgtattgacataaatgcatctattagaccttgggggaaaaaagagttgatggcaaaggatatatgtaatgtgtcaacaagaattcaaagaacttgccattccttgacataggcttaccttgtacctagcaaagcaagctatgggatttctgatcacatttgctagtacataccttcatgacacagactttttagcacttttgttatcaaaagaaaaactcaaaaccgattagatgtcaaaaaaaaaaaaaaaaagaaaacctaaaccatatcctttgttttatgtacacaatttgcatttacttcaatttttgcctaaggaccagtaactcttgcaagaaaaaaaataagagaggtatgcatcacaaagactgatcttatttagtttctatcaagaaaatccatgaccagttccataacttgccacaaaactgaaaaactgtgtggttttgagtatgtacattttggggatttttctttctgagaagggggtcaagagcattggtcagatgctcagagaggacccttgagccaggactgcagtctcctgtgcaccgtggagcctgggagcattgggaagacctcgaagaactctggttcaagtaattgctactttctggaggcaaaagaacagtgccccttcaggacccaccatcgccaacctcaccacagccctcggaggcatctggaaacatgtcaaaaagactttggaaagtattaatttgacatattcatgatgataaggtaaacagaaataacctcctccataaagacaaagcagaaacagcacaatttacaagcgagaaagaataagaagaaacctgaaattgaaataaacttcacactactcctagaagtggttgctacagtagttttaaacgccctttaaaataaagtcaaaaatactgaatgtcataaattccatctgtgctgccctctgctggctacatgaaaagattgttaaaagattgacatagaaattgcaccaaaaaattccattacctggctgggcgcagtggctcacccctgtaatcccggcgctttgggaggccgaggcgggtggatcacaaggtcaagagatctagaccatcttggccaacatggtgaaaccccgtctctactgaaaatacaaaaattagccaggcatggtggcacacacttgtagtcccagctactcgggaggctgaggcaagagaattgcttcaatccaggaggcagaggttgcagtgagccgacattgtgctactgcactccagcctgccaacagagcgagactctgtctcaaaaaaaagaaaaaaaaatttcattaccttttgaacatatatagggagaggagaggcaattcatgttctacccagcgcatgtgccagttcctatgtgtatattcaccagtactgatttcctgaaagggctttgttaatatcaacattggtttgccctttgtccacacacactggctaatttgagggatagtgataataggcttctactatacaggcagacataggcaaaaaactatatacacaataaataataagtaacatgctagaaagtgatgggtgctatggggaaaagagaagtatgtggcagggggtggggtcaggtattgttaagttttaaataagacggtcagaacaggcatcactgcaaagataaaatttaaacctcagttacttcttcctcaactcctccaaaaaaatattcaggattctcttttctaaaattctgaggtatacaaaatacatgtatattcttctctgaacctcctctattcctcaccatgtagactaatgaaattacgcaacacctgcaagattttattacaaaggccactttcccacaaggagacccgagctccaagacccacagtgacagtgcggcgaccgagtttcctacttcctctgtcttcctagggtaaaagtatcactacatggtaacctgagattctcttactttccatctgaaagagcctaacacttttagaatgccgactctcccattttctagctgctcttcacatattgatttactcatcagagtaataatttgaaaggccaggtgtgatggctcgtgcctataatctcagcactttggaaggccgaggtgagaggatcacttgagcccaggagttcaagactagcctagacaacataaacagactccgtctctacagaaaactaaaaaattagctggctgtggtggtgcgtgcctgtagtctcagctacttcagagggcgaggcaggtgatgaccatctgggctcaggaggtcaaggctgcagtgagctgtcatcaccccactgcactccagtcttcgtgacagagtcagactctgtctcaaaaataataataataaaagtgtacactgatttattaaaaaaagatttgactctttaccatgtgttcattctaaatgatgtctgttgaactgtgccaagcactatgttagccaagagctagacctacaaaggtcaagaaaacaaagtatctccctcttcaaaacacaagagttcattggaggacacaggtaatggcagcgccaaaaaaaaaaaaaaaaaaaaaaaaagaaaaaactacatggcatgctaaggatcaggctctgaaggcccagagtatgccaggctcgtagagtaagaatagaaaaagtccctgggaggggtgggaagatagtggcacaggtatactaacgaggggagtgacttttaagaaaatgcacactctcagcagcattctctggtatttaggaagagatctggggagactcaaatactgcactgcggtcccaatcttgaaggatctagaggtcaacatctgcggggaggaggcactgtctgggagaggcaggacatttttagagaatactattcagtgattttagcatgttcacaaagttatgcaaccaccaccactatctaattctagaacattttcatcatccccaaaagaaaaccccataccccataggagtcacccccattcccgcatccccaaacccctgacaaccactaatctactttctgcctctacagatttgcctaatacatggccttgtgtgactggtttctttcacctggcacaatgttttctatgttcagccatgttgcagcatgtgtcagaacttcattcctttttatgactaaagaatcttcccttgtagggacagacttcatcttctttacccactcatgagctgatggcatctggttgtttccactttggggttcttatgaaaactgctgctataagcacgtaaaattttgtgttgtataggatctttaaaactatatctatgttccactttgattaaaataaatttcacagtatttttggcccttgagcccctatgctcgggtccactctcacactgtggagtgtactttcattttcaataaatctctgtttttgttgcttcattcaaaaaaacaaaataaaataaatttcacaatattttctacttttctgaaccctacccattattcaaagtccagctctgcagcctcctcccatcacatggctctctcactgtccgccactgcaccccacacaccggaaacaaactaaagatgctgacccacatttgtggtaagtttcacctctaaacattctctgattctgagagctacgagtcctatcatcaaaaatgaaaactctatggaaccagcttggcgtggttttactggatcactgagtagtcatgccaggtgtcccgtcagctggtgtaagtattgatcatcctgctgtgtgattaacaaatagtttcaacacagtcctgggtcaaaggaaaatgtttacacatccaacaggcccaggttactgtaggggacaacaatgcctaggttatcaggaaagctcactgtttaactggattcaaggaataaattataagcaccagccatttaatgataaatacaattgatctttctagtacttttattacttgagagaatacaggagaattgtctgaagaagggggtaagggagattattcaattaattcattgggttttctgtatacttctaaaccaaattcagttaggaatttttaccaaaaaattccagccttaattcaaggatgtttatgaaagcaaagttctctgatcaaataagagtaagtaaaaacgggtgggcgggaggagtgtgcttgcttttgtcccttgttgctttggagatctactttgatacaggagcactgcagatccccttcctgtttcctttgctctcctgccttactaattatatatcaccccttccttgcaaaaccacaagaccaaatgttacaagttacaaaattggtgtactccacccatcctttactcagctgacacagagcaaactgaaccagcgcggtcctgccacagccctgaagacggaaccatcacatgacagaggagcttgcgagaagggcccaacacacccacatactgtgtgaggcagagcaaaggtggcagcagtaagaccaccaaggtcagccagtccaaacttcttgatacctgttattgatttaaaaacaaactaggccaggcatagtggctcagacctgtaatcccagcactttgggaggccaaggtgggaggatcacttgagcccaaaagtctgagaccagccagcactttgggaggcgaaggcaggcagatcacctgtggtcaggagttcaagaccagcctggtcaacatggcgaaaccccgtctccactaaaaatataaaaattagccaggcatggtggtaggcacctgtaatcccagctactcgggaggctgagacaggagaattgcttgaacccaggagtcagaggttgcagtgagcagagattgtgccattgcaccccagtctgggtgacagattgagactccatcccccctacaaaaaaaaatttaaaaattagccaagtttggtgggtgtgcctgtggtcccagctactcaggagattgaggtgggaggattgcttgagcccacaggtcaaggctgcagtaagctatgatcatgccattatattccagcctgggtgacaaattgagatccctgtctcaaaaaaataataataacaaataaaaataaaaaaataaaaaaaaacctaactaagcagaaaccattgtttaaaatctaattatcttgctttagaaggcaggtggtttcagaaaaaaagaactctaaaacaatctatttttgaagtgtttttttcccaagattttctccaagcttttacttaatacattgttcagatgtttctctgccctaaaaaaaaaattcccttacagttcaaaaaatattcctaacaggtttagaagcagtcctcaaattgcagaaactactattacccaaagaaataccaagtgctcctaaaataataccacatacttattccacaaaatatttcttagcctgctccctctgggtctgaaaaggatagcaaatcaatggccagggggtgagaatatgcttctccacgtgcccagaaggaagggaacatgagatatgggtgcacagagtggcatcagctacgggaagctcatgtggcatccaggcaagtaattcagtggcctccactagcacatcagcagcagagatgcagaaaaacagattacttcaagatgcgttttggaagtagaataaaccatactactaatgaactggataggcagaacaagagaaagggaaggctgatatcaaaacattcaaaacatttgatgggaacacctatgtgagcggatatgctatttctcaggtggggtgaataaagagggacacagcaccaggggctctgctgtggccatgccaactgtgagagaccctgtaggtatcccccaggagatgtcaaatgtggcactgggatgtcacagcctgaagtttaggggtaggaagagggctaagctatagctgattcttgctattcaaagtagttattgtttaaaaagttgttgctgttgccgggcacagtggctcatgcctgtaatcccagcactttgggaggcctaggcgggtggatcacgaggtcagagttcgagaccagcctggccagcatggtgaaaccccatctctatgaaaaatacaaaaattagatgggtgaggtggtgggcgcctgtaatcccagctacagctacaggcagggagtattgcttgaacccgggaggtggaggttgcagtgagccgagatcacaccaatgcgctccagactgggcgagagagcgagactccatctcaaaaaaaaaaaaaacaaaaatagtcattgctaacactgaattggaaaagactaaaccgttgctcctaggggaaatacaggttaggttcctacagacctctggtcacacttttgtcaactgaacaatacataaccttgtttatatgggtttctgtttaaagatggcttatttaatatatattgttgtgttttgttttgtttaagacagggtctcactctgtcacccaggctggagtccagtggtgacatcctggctcactgcaacctctacctcccagactcaagcaatcctcccaccttagccacctgaatagctggaaccatgggcgcatggcggggggacatgggctctatttttagtagacacagggtttcgtcgtgttgcccaggctggtctcaaacccctgggctcaagcaatccacctgcctcagcctcccacagtgctgggattacagatgtgagccaccatgcccagccaactgttgattcattaacattgaactcatggccaacagcactgtaactcattcctgagcaaagcttcgctaacatactatattttctccataaggcacatcatggcctcttgtacttaggaacaatagacagaaattcagcattatgattaggggctattttaaagagcaagtcaccagcaaaggcacaaaaatacaaaaaaaaaaaaatgtaatgctaaatagaccacataaaggtcatttgtttacagtatgagggctgaaacaagaaatcagtcaccttgtttcacagtggctggaaatgtgtacactgagcaaactgcatttttcactgctctgtgaatgtccagaaatgaccacgaaaggactacctttggactgatttgcgggttacaaataagctttagtgagtaggaaaattcatgaatacaaaatccacaaataacaaggattgactgcataaacgaagaaggaatcagagtacaggtatctctctgctattggttatatcaaatgataatttcatcttttttgttttttgttttgttttgagacggagtctcactgtgtcacccaggctggagtgcagtggcatgatctcggctcactgcaaacccggctaattgttttgtatttttagtagagacagggtttcaccatgttggccaggctggtttcgaaaccctgacctcgaatgatctgcctgccacggcctcccaaagtgctgggataacaggcgtgagccaccgcgcccggcctcaaatgataatttcaaatagtctagttcaaagatcctattactgggaaagaaacggagaaatttaacctattttactaatttgcaacatatttcctagatgtttgaaataaggactcctccatctccctctcttcgccagttacaaggctgatcatatgatctccatgttcagatttctttttctatttctagtaggtttagagcttgtgaggaaaaagggaaatgttagttattactcttttccactgtaaaggagttttttaataagcatttttatagagattttcatagaaattacctttaaaaagtacctaattggagtaaaatctctactatcaataaagagtaccagggctacagggataaacaatgctgccgatcatctcagacaggacagagaacttcttttttttgagacagagtcttgctccgtcacccaggctggagtgtagtggtgtgatctcagctcaccacaacctccgtctcctgggttcaagtgattcttctgcctcagcttcccgagtaactgagactacaggtgcgcgccaccacgcacagctaatttttgtatttttagtagagacagggtttcattattggccaggctggccgcaaactcctgagctcatgatccacccgcctcagcctcccaatgtgctgagattacaggcgtgagccactgcacctggccaagagagagaacttcaacaacgtatttcagtttataatcttaaccatgtaaatataagtaaggtcacacacctcatatcacaatgtgattatacagattaaatacgatactgaaaatgttaaaatgcctaattaaatacaaagccataggtagtactataacgcatgaattttgttgttgtttagttcaagactagtcctgccaagacattcataatcttgggaaacaggacacacaagaacacataaagcaagaaaaagtacactcaggattaccaaatctcccccaaaggtttactcttccttttcccaaagtcttaaggcacatgtatgagtgagtgtagggcagggtgggagaggggcaccagagtcaccaggaacatgaggacaatcagaggcaagcctctcatgccaccccagcacagctaacagactgtcaataaatggtcaggctgggcgtggttgctcatgccttcaatcctagcacgttgggaggctgaggtgggagaattgcttgaggccaggagttctagaccagcctgggcaatatagtgagaccctatctctaatttaattataaggaaaaaagaaagaaaaaataaaaacaagtcacaaggccggtgccacaggcaagtgccaaacctccccagaagactcatgctcttggccaggcagtggctcatgcctgttagctcaacactttcgggaggatcacttgagcccagaagtttgagaccagcctgagcaacatggtcagaccttatctctacttaataaataaataaataaataaataaataaataaagataacaacaaagaatcggagggctgctgacatccctaattacatggggtttgtgcactgcccttagggaatctaacagtagattataaacattaactgagcagtaataacagttaggacagaagacagtgtataataaggtactaaatggactaaataggtgatttgccatactccaattatgaaaacaccaacttctgcaaactttaattacttttaactcctgccatctatctcatctggggacatcaatcactgattctttagagtaacctttaattaaaatcttagttccaaagtatgttgtctagtctagtacttcaaacaccaaaaaacccttgcagaattgttctaaaatgatttttaaaataatcccttaaaaaatataagaagtcccccacctcaccccttttttaaaatgattcaccactgagtggtaatgacatcatcaatccagcgtactgcaaacacctggctgatggcatgctaggatcctctcctctagatacacgtggagtagggagggagggtcaaagtggccgttgtgtgaagctatgtcacattgtgtgtcaggaccgtcgtggacaaagcgaccggctactgagaagcagcgcatctagataaactcggaaaggaaaggcatgcgtgtgatgctgacagaactttccaagagcaactgtcttctctgatctgccatgcttcaaaaacaaaccctcttacgcagatttgcccacccataagaatttatacttctagtttttacgtgactttccctcaattttaaggaaatagaaaattgtggggttttttgttttcttttttttttctgagacagggtctcactgtgttgcccaggctggagtgcagtggtgcaatcttggctcactgcagcctcaacctccctggtttaagcaatcctcccaccttagcctcccaagtagctgggaccacaggtgtgcaccaacgtgccaaactaatttttttcttttttatttgtagagacagagtgtcactatgttgcccaggctggtctcaaattcctgggctcaagcaatcctcctacctcaacctcaaaaaatgctacaattacaggtgtgagccatcatgcccagcccaaaattgtgatttttagtacaagaatataaaataaatttttgcatttagtttgtgactgaagttttatgtcacttttttaaggtaaatccatttttaaatttatgcaaaataacatacttataaaaatctttaactgctttgcatattatacttatgttaaataaaagctcttctaagccttattttgaaactagttacatatcatttgtacattccattcctaactaacctctattatattttatatataataaaacatttttaaggggaaaatggtctgtcacacaatccagccattccatgtgtaggtataacacaagagaagtgaaaacatatccacataatgactcatacatgaatgttcccagcagttttatacacaatagcccaaatctggaaacaactcatatgttcatcaacaggtgaagagaccaaaaacgtggtgcagccatacagtggaacattactcagcaatgaaaaggaacaactgatacccccaacaatgaatctcaaacataatattatttatttatttatttgttttgagacagagtctagctctgtcacccaggctggagtgcaatagcgcaatctcagctcactgcagcctccgcctcccgggttcaagcaattctcctgcctccacctccagagtagctttctgtatttttagcagagacagccatgttggccaggctggtctcgaactcctgatctcaagtgatccgctcgcctcggcctcccaagtgctgggattacaggcgtgagccaccacgcccagcctcaaacacatcattctgagtaaaagccagacatgtatgatgttggcagtgggtttatttaaaaaaaaaaaaaaggaaagaaagccagacacagaatatacattgtaacattgtatgatttcacttacataaaattctaggaaatacaaactcatctgtagtcacaaaaaccagatcagtggttgcctggggccggggtagagggaggaatggacagcaaaaggacatgaagcggcggccaggctcggtggcagcactttgggaggctgaggcagggggactgcttaagcccagaagctcaagaccagtctgggcaacataaataaacaattagctgggcatggtggtgcaagcctgtagtcccagctacttgggaggctgaggtggaaggactgcttgagcccaagaggttgaggttgcagtgagctgtgttcatgccaccacactccagcctgggagaaagagcaagacactgcctcaaaaaaaaaacaaaacaaaaaaagaaaaacaaaacaaaaagggccatgaagcatctttttcaggtcaagaaaatattgtgctttattgtgatagtggtttcactggtgtacaaaactgctgaatatatcccatcaaattgtacactatttatttatttatttatttttattttttttttttttgagacagagtcttgctgtgtcacctaggctggagtgcagcagcgtgatctcagctcactgcaaccgtcacaccctgggttcaagcgattcttgtgccacggccactctagtagctgggattacaggcgcccaccaccacacccagctaatttttgtatttttagtagagacagggtttcaccatgttggccaggctggtcttgaacacctgatctcaagtgatccactcgcctcggcctctcgaagtgctgggattacaggcatgagccaccgcgcccagccaaactgtacactttaaatggataccatttattccatgtaaattatacctcaataatttttttaaaacaaggagaaggaacctgaaaagtctgcagcaaatagacaaatggaaattaatgtgctcatcatcaccaattaaaggtgctgaaaatgtcagttagtacccctagtttgctaatgaggctatttgaagtccttcagagaactgagtgacacagtgagaccccatctaaaaaacaaaaaagaatttaaaaatctgtctattcagaactaaatcattatttgagtggactcatcttcaaaagtctttaacacattttggggacacagatgtctattagaaaataccactggggtgagaggatcacttgagccgaggaagtcaaggctgcagtgagctatgatcatgccactgcactccagcctcggtgacagagcaagatctcatttaaaaaaaaaaaagccttcataatcaccaggagacacaaggatgctgagaggttaggaacacaaagttcaaccactggcctatattccaataaacatggcaaaaattagactaagattattcacaaggcggaatttcaaggtttgaatttttttcttttttttcttttttttttttttttttgagatggagtctcgctctgtcgcccaggcttcctgggttcacgccattctcctgcctcagcctcctgagtagatgggactacagacgcccgccaccatacccagctaattttttcatacttttagtagagacaaggtttcactgtgttagccaggatggttttgatctcctgacctcgtgatccacctgccttggcctcccaaagtgctgggattacaggcgtgagccaccatgcccggactcaaggtttgaattttcaacataacttaagaaaccctcatcctttggggggatgaccgtgagtgcagtttaaaaaaaagaaaagaaaccctcctatgaattaaacaggtcttggttagaggtcaaagttctccttctaattagaatgtaaggtacctgagaactctattcatgtctaaattgcaaggcccatagagtgtccagctcattataggtgttcaataagtatctgttgaatagatgaataaaaaacgacctgggaaagaagctgctataattttcccattctaatacatgtaaacactagccgaggttcttagaacaaagttcattctgccaatgctgagagaggcaggaaaaaattttaattatatcagcaacccaaaagattaaaaaaatattcagccgggtgcagtagctcatgcctgaatctcagcactttgggaggctgaggcgggcagactgcctgaggtcaggagtttaagaccagtccggccaacatggtgaaaccccttctctactaaaaatacaaaaaaaattagccaggcatggctacttgggaggctgaggcaggggaattgcttgaaccagggaggtggaggttgcagtgagccaagatcgcaccactgcactccagcatgggtgacagagcaagactctgcctcaaaaaaaaaaattcaaaaaaaagtttaaaaaaatagtaattcaatgtcaggaaggataaattaacaagtatcatcatatactggtatgaggtgtaaactgattcacactttctgaaaacccatttggcagtacatatcaagagactacaaagttaaactccctaacccagtaagtccacttacaggaatctagcctaagaaaatcactggaaatgtgagcaaaactttatccacaagaatgttacaggattctttcttacaggaacaaagtggaaacttctaaataacaagacaggatgattaattaaactatgctccatctatatcatgctgcctttggccgaggccccaagcatccctgcatgtccttgctgagagtgccaaactgcaaggtctgtcttcttgtagctggcgacatgaagttggtcaaggagactgtagcatgacatgcccccattgaggagaagaagcctggcctgtctatcacttgctataaaaagtgctaagcccaggcccggtgtggtggctcacgcctgtaatcccagcactttgggaggccgaggcaggcagatcacccgaggtcaggagttcgagaccagcctgacaaacatggagaaaccccgtctctactaaaaataaaaaattagccgggcatggtggtgcatgcctgtaatcccagctactcgctaggctgaggcaagagaattgcttgaacccaggaggcggaggaggttgcagtgggccgagattgcaccattgtattccagcctgggcaacaagagtgaaactcgaaactccatctcaaaaaaacaaaaaagaaagaaaaaaagaaaggaaagtgctaagtccttggtggtccttggttcctcagctgtaggcaaacccaattcatgcatagacatcatctgggcccatcatgtcaccccacgagacttgaggtcaggggcaccagcactttcatgctgatattcctgctatttgctgtgcgatgtgtactaatctgcctcattctgatccagtaggtctcgttatctactttcggcatccacggagttatggcatgtgcttgtggccctagctactcaggaagctgaggtgggaggattgcttaagcataggagatcgaggttgcagtgggctatgacaacaccactgcactccagcctggtcaacagagtgagatcctgtctcaaaacagaaagaaaatttccataataataattttctcaatgtttgccaaagtgctaaagtaagaagggcacaattgtagccaatcgaagcccactgcctgaggtggcttcattttcagactatatggcaactgccccgaggaaggactaaaaggtactctccaaagacactctgggtaagtggacgcagcctcagttcttcgtaggtctcatgcgcctagcagtctacatcccagcgccaagcctctctttcatccaacggggtaggcaaaggggtctttttaggttgcttcctcactgttgtacagatcagggctctaaaactggcacctggccactggctgcctagcaacagctgcaacataaagagacggtatctcttaaaaggaacaaaacagaaaaccacacaaagacacatggggaagctaaagtgggtaggtagctatatacttggtagctataataaaggagtaaaaacaaaaatccaaggttggttattcttgcttctttcatctgttgagcctcttcttaaaaacctctgtaagttcaaaaccctccaagcggaatactgaatggcttaaagcaaaaccacataaattagatagttacagctgaggaaatgcattcaacactcagccatcccttcctacaatcatggacgcacaaattcttgtgaaatcattttatacactcaacacgggaaatgaagggaagcatctctggccaggccaactcaagccagagcctgcctgtgtgatgtgaccttggagagaacagttagaggttctgaagcgtgagtttccacacctggggtccccaaatttaggggcattagaagtatatttgtgtgcatgtgtgtacaagcatgtgcatgtatgtacgtatttattcattcactcattcctggatctgccctggtacgtttggtatggctagagtaaggaaccagaataaatggcttttttgaaagattcctccagggattctgcgggttagtcaagtatgggaaccaccattctaacccaaatttactagattacgaactttaaaagggaaggctaaacaaaccacttctgcatgttcatctgcctaggacatctgctaccacaattgcaaaaggtgcccatgtggaacggaaaatacatggttgaattttacaaatttagacatataaagctaaaaactcaagaaacactgaattccctcttttgactactgatgttttaattctggcctctatccaaatagcaggtttatatatatatatatatatatatatatatacacacacatacatatatatatgtgtatatatatatatatacacatacatatatatatgtatatatatatacatacatatatatatgtatatatatgtatgtatatatatatacatatatatgtatatatatgtatatatatatatacatacatatatatgtatatatatatgtatatatatatacacatacatatatatgtatatatatgtatatatatagtttaaaagaaagcaacaacattctactatcttaaaaccctcttttctaaacactagaaaatcaaaaatcgcattacaacagaacttaagacttttaaatagaagtgaaaaagtaattttacacaaaaagcatcatatacttatctttctaaaagttacaggtatcaagtaagtctgatgacatcacttctcaaaatcaaaatatatcccagatgctcctcaacttacaatggggttacttcccaataaacccatcgtaaagtcaaccataagtcagagacagtctctatatattttcttgataaatgggatacccacctcccgggttcaagtgattctcctgcctcagcctcctgagtagctgggactacaggcatgcaccaccacacccggctaatttttgtattttttgtagagacagagtttcaacatgttggtcaggctggtctcgaactcccgaccttgtgatccacccacctcggcctcccaaagtgctggattacaggtgtgagccaccgcgcccagcctcgcgatttccaagttttcagtcacatagcaatgctacaataaacacccttgtgcacacattctggtacacaacagcagttccccaccttctgagtcccaactcaagaggttcttgttttcagatttcaagtttcagatctccaaggggaactaattctcacaggaactgctttttctagtcctgctctaggctggaatggggtgatgtgtaacctatttttgtgttaaaatcaattgaccttgggaacgtgataatacagggaactaaaagcactcacactactcaaagcttattaaaacctctttaaaaatcaagaggcaggggccaggcgcggtggctcacgcctgtaatcccaacactttgggaggccgaggcgggcggatcacgagatcaggagatccagaccagcctggctaacacggtgaaaccccgtctctactaaaaacacaaaaaatcagccgggcgtggtggcgggcacctgtagtcccagctacttgggaggctgaggcaggagaatgacgtgaacccgggaggcggagcttgcagtgagacgagatcacgccactgcactccagcctgggggacagagcgagactccgtctcaaaaacaaaaaaaaaagagtgttatttttaaaaactttttaaagcttaaattcctcttattagaatgctatacacacacatttatacgtttgagaaaacagtagtccaaagcaagagcaggaaagggaaagaacagtagtagtcagctagacatttggttttgtatccttaacatctattctgagtggaaattaaaccaaatgagcctttaacataaacgtttgaaagagtaacagcatctggcctgcttcctccatacaatgaggtgtccatcatgtgacatgggggaaaacagcagatttctggaaaaataattaccaaataatgttgtgccaacatcttctagaataataaacttctttttcctatcaaggtccattgttcagggacatttccattacctgacaacaggaaaaattatctttactctcagagtacaaaaacattcctaagaacagagagcaacaacataaccttctgactcaagatagtctctgttccggtaatttgatgacaaatagtgttgctgatcagcagaatatagagtggaaagggcggcttttttgcacatgccttcccctacctttgaattaggagcactcttctaaaactagaaatgcttcacgaagtcagacaaagtctacaaagtactgcaatacttaatacccatgaggcacacttccataagaagaaaatgatatgcaggaaggattaaactgcccattctcacaagaaacattccatgggcaaaggcactaaggtagatgtatagatgtagtcggcaggataatggtcccaaagatatacatgtcctaatcactggaacctgtgaacatgttaaattccatggcaaaaggggattaagattgcagatggaattacatctcctaatcagccaactttagaagagggagattatcctagagtatccaagtgggcacacggattcttccaaatggaagagggaggcaggacaatcagtgtcagagtgatgagaggtgagactcaatcagccactgctggctttgaagatgcaggaaggagctaagagccaaggagtgtgggcagcctttagaagctggaaaggtaaggaagtagatctttccctagagcctccagaaagaaacacaaccctgctgaaatacattttggcccagtgagacccattccagacttctggcctccaaactgtaagataataatgtatattgtcttaagccactaaatttgtgataatttgttatggcagcaacaggaaactaatacaatggaaatgtccgtccggctgctttctggatgtttttaatctcaaaaaaagacttttggccaggcacggtggctcacgcctgtaatcccagcactttgggaggaagaggtatgtggatcacctgaggtcaggggttcgagaccagcctggccaacgtggtaaaaccctgtctctactaaaaatacaaaattagccaggagtggtggcatatgcctgtagtcccagctacttgggaggctgaggcaggagaatcgcttaaacctaggaggcagaggttgcagtgagccgaggccgtgccaaaaaaaaaaaaaagacttttaatccctctcaagatacacacatttatatacacatttgtcaaacaccttaatacttcctagaataaagtggattcacaccacaaatcaccttactgtaggttatagagtagtccctccttatccacaggggatactttccaagaccccccacggatgcctagaccacaaatagtagtgaaccctatatacaacatgtttgttcctatacatacatacctatgataaaatttataaagtaggcagagattaataataaactaataataaagaacattataataaataataaagaacaataagttgttctataaaatatgctgtaataagagttacgtgaatgtagtctctcaaaatatttccttgtactatactcacatattttcaaaccacagctaactgcagataattgaaaccatggaaggtgaaaccatggataagggggaaagtatgctagcctcctcttaaagaatttatttgctacactcatctttcaaacatagaataggccaggcgcagtggctcacgcctgtaatcccaacactttggaaggctgagataggcacatcacttgaggtcaggagtttgagaccagtctggccaacatggccaaaccctgtctctaccaaaaataaaaaaattagccaggcacagtggtgtgcgcctgcagtcccagctactcgggaggctcaggcaggagaatcgcttgaacccgggaggcagaggttgcagtgagccaagatcccatcactgcactccagcctgggtgacagagcgagagtctgtctcaaagaaaaaacaaaacatagaataatcattttcttctttttataagctcacaactaataccataaaataatatttccatctaaatgtcttttttttttttttttaagacacagtcttgctctgttgtccaggctggagtgcagtggcactatctcggctcaatgaaacctccgcctcctgggttcaagcaattctcctgcctcagcctcctgagtagctgggactacgggcgcaccccaccacgcccagctaatttttgccaggatggtctctatctcttgacttcatgatccacccacctcagcctcccagagtgctagggttacagatgtgagccaccgcgcccggcctaaatgtccctttttcaagatttgtactgaaatctctgaatgcataaaaaatgtctctataaacttcccagcaagtcaacagtgaggaactcactaactggttatcaacataagcagtttcagcaagaaccaggcttatatataaaccccaaaataatggaagaatgaaattagatgtatgcacgaggtaagagggatctattttaactgcaactcccaagtttccatgagcaatttcagtgacctttgtttctatatcaaaagcagagggagtgggggagcatggatttaatgattcagtcaacaagctctgagagcctacaatgtgccaggccctgtttctggcatgcacatgggataggggagagtaacaaaagggatgaagattcctgccttgtggagtttccacttcagctggagaagactgaccatgcgtaataaacataatgagtaggttcccgggggatgagcattattgggagtcaagcagggtaagggtggcaagcagagaggaggggggcactggctgctcaagcaaacaggggaagtcttgtcgagagagtgcgggaactgagcatgaggttatttggaggaaaagcatccctagcacagtgaatagctggagaaaggcccgagctggggagcgtgcctggtgtgtaccaagcaccgcaaggagtttgctgagtgcatgagcagaggggcatgggtatccctgatgggtcccaaggaacaggagcaggatcaccgggaggccctccctgaggcatcagtagactcaaagagaagccttcctcagtggaccatggaacacacccagaaaacggggctccttctaaaggtagaccccaaagtctaggttggaatccctatttcttttgggatatcataaacccataaaataaatatttcaattataattctaaaaatctttttagaatttaatttcctccatgctttgtcactgcagtctggacacagagaaatcgcagaagtctttgtcaaagttagagaacaagttgaagaagtctccgtcttcaataaatcagtaaaagccagtgtggagtagaggagacaagcctgaagtgggctattcagaagtccaagagggtttcaatgccaagcaaaacaaatggcaagccctcaaaagctgtatctgactctattttattgtcagtttgctgtcctgactaaacagaaggtttagtcaggatggtcccccagatggtcccccagaagacaaacaccaagaggtgccacagcacaagacagtggtgtttccagggctccctggatgtgctccccaagaaccagagtccacagctgagctgagagcaggcaaatgatcacaacttgattttttttaaatcctgcaatagcatgaataaagtggcacaaatccaagtcctaaagtctatttttgaacctgcaaagctagagggtcttgtcttgagatccttggtgaccctaccacagtactcacattccaatgaggccctgtcaaaaaccagccttaggctgtgcacggtggctcaaacctgtaatcccagcactttgggggtgggaggatcgtctgagcccaggagtttgagaccagccagggcaacatagtgagatcccatctctacagaaaaaaaaaaaaaaaaaaaaaagccagcccctcctctagcaggagacaaagcttccaagtcaggacttcgggcaggaagactctgggagctgctctgtaactccctggaagaaacattattctgctagtgttctcctgtctcactgttaaatgagttctttcagcagcctttttatttagtcataaagggcaaaaaggctaagagaagccatgaaaagacccctgaaaatggctgagagacaagctcagtaagattcgttaacctttacctggttacctggatttctcataaattctagtggcccaaccacaaaacatgttctggctccagggaatcatcaaaggccaggctgagtaattcttgttgccacaacatcaaacccagtttaccagagtccctggaaggaaacagcagcccctaaactaaatgctacccgggggattaaggaaaaagatactgcctttactgcatgatcctacaaactcctcaaatttcaaccctaagattaacaatggctctttcaatgtaaatgtgtttaataaccagcaacacaggtttaaccaaaactctgtccaaactatatcaagatacaaaactctgtatccactcccagaagaaagaacgtttagaaagtacataaattcatctctgagaggtctgagaaaaagaaaaaacaatgaaaagacataaatagcatataaggtatgtaaaagtacaagacataaaaatgaagaggggggtgtgaatgagcagccagtatagaaaaagcccattcaaagcatggcctgtgcatggagcctgagaaatctagcttgtggtgccagctcaaccactcagcagctatgtccctttagaatctctctacttctccatttcctcacctataaaatcagtacagtatttgttgccacccacagggtaactgtgagggttcaatgagaacttacgaaaaatgttcagcaatgaacttcatgtgcagcaagcagttaactgctagtgtgggaacagctagagcagtgacacctactctggcatgttcccatctcacttcatcccagtaggtaactgcctgttgggtttgctcaaaagtacgtctcagccgggcatggtgtctcacgcctgtaatcccagcactttgggagtccgagatgggaagactgcttgaggccaggaattcaagaccagcctgatcaacatagtgaatccccatgtctaaattttttaaaaccattttttttaaagtacatctcactcagaacacagtgaaagctgaaagtccccaggctcccatagcatttgttggtatttccaccatagcaaatttccacgtgaaccgccctacactgtgagcttctggaaagcagggcctatatcttaaaattcttcacagcctgagcataaagcaaataccctgacacaaagaatttaaaaagtctgaacaaacggatgaatagatgaacaaatggatgaatagatgaacaaatggatggttgaatagatgaataaacggatggttgaatagatgaacaaacggatggttggatagatgggaaacaatttaaatggcaagaaaaagaatccagtgtttttttcaagccataatgattgcagtgataagtgaatggtgataaaagtttaaaaattagagaggtctagaggtaacaccagaatgaaagggccaggagcaagtctcggacatgctgaatcttggacaatgatgggatatccaaggggaaatgtgcaggaagcacttgaaaatgccagaatgcagctaagattcaaacgttctcttaatttcaatcttagggctgttggaaataatatttcagagaattagagaacacaaaagaaaggaagttaaacaggtttcaaaaacacatatagtctgcagctgctgtgtacagaagccagaacagacaaaatgaaatgtgagaccgatcgtcctggaggtttacaacacatcacatatgaatgttttcattcaagactggctcggaatcattgtccaaaggtataaaaaggagtctataaatactcttaatatcccccagaaaaatacaaaaagctctccactctgcaacttccagctcctgccctctctctctttccatttaccatctagttacctgaagagttatatacatttgccttcaaagtttccctttcagatctcttcctctacccagcccttcagtggtggtattccaagacgacatccttggactcctcaatcagcccgtggcatcacccactccctgggttccactcccactcctgcgttgatcatctctggagttgcaggttcaaattcaactatttaaatgggtctctcaaagtggacactgtacaagtaccacaaaactccagagattacgtccaaaaccgaagtcctattctcagtatggaaactctccaagcagtcatccaaagacagaaacctggtgctcaccttcgtcaccctgtctctttcatctcctttcaatgctatgtccctcccaaacactggcaaccaaatccatcaatttcatgtccttcactggtcctgtattttttctctcctacctcctactcccacagcctgaattcaagccctcatcacctagctcacctatctccaaaaattccttaagggtctctccactgccaatctgagccacactaagtcagaagaatctttctaaaatgcaacagaatgctctgcttctccctctccttgcctccacctgcttcctttctctctcccttccccctcttggcaaaaataaaaaataaaaataaaaaaaagaacgggcgcagtgcctcacaccagcaccttgggagatggaggttggcaaatcacttgaggccaggagatcaagaccagcctggccaacatggcaaaacccagtctctactaaaaatacaaaaactagccaggtgtggtggcacatgcctgtaatcacagctactcaggaggctgaggcacgagaatcacttgaacccaggaggcagaagttgcagtgagctgacatcacgccactgcactccagcctaggcaacagagcaagactatgtctcaaaaaaaaaaaaagcaaaataatcagcataaaatatccctggtttaaaccctctcatagctccgtgtcccacagaataagtcctgtgtaacaacacatactgaagccccccataactgtcccccatttctctaaccctgcctctggcctcctccctctgctcacagcctactctccaggcacaaagaaccatttgtagctccccaagtggcgaaactgcttcacacctcctgtcctctcattctctttgctttgatatatacttctttgcaatgttctcctacttggcactaactcatctttcacaatccagcccaagggccagctcctctacaaactctcccctggccaatccagtgccatcccagcgccagtggaactggcactgctctccttggtttacctacatttttcatgcacacacctgccacatctactgtgacacgctccttcacagcttgctgccatgtttgtctcctccttctagactcaaagcatcggtgacaacagggactacatggtatgaaatgatcactcatgcttgttgactgaataaaccattacaaactactcatagaaaccaatctgcgagccggatgcagtggctcacacctgtaattctgacactttgggaggccgaggcaggtggatcccctgaggttcggagttctaaaccagcctggccaacatagtgaaactccgtctctactaaaaatacaaaaattggccaggcacagtggctcatgcctgtaatcccagcactttgggaggccgaggtgggtggatcacgaggtcaggagatagacgccatcctggccaacatggtgaaaccccgtctgtactaaacatacaaaactgagctgggcatggtggcgtgtacctgtaatcctagttactcgggaagctgaggcaggagaatcacctaagccagggagtcagaggttgcagtgagccgagatcgcaccactgcactccagcctgacgacacagcaagacttcgtctcaaaaaaaaaaaagaaaaatacaaaaattagccaggcatggtggcgggtgtctgtaatcccagctacttgggaggctgaggcagaataattgcttgacccgggaggtggaggatgcagtgagtcgaaattgtgccactgcactccagcctgggcaacaagagcaaaattcccatctccaaaaaaaaaaaaaagaaaagaaaagaaaagaaaaaaaaaaaaacaaagaaatctgtgatattactacaaaataggcgggttttttttgttttgttttgttttgttttgtttgagacggagcctcactctgtcacccaggcgggagtgcagtggtgtgacctcggctcactgcaatctccacttcccgggttcaagcgattctccttgttcagcctcccaagtagctgggactacaggcgtgcgccatcacgcctggctaatttttatatttttagtagagatggggtttcaccatgttggccaggatggtctcgatctcttgactttgtgatccgcctgcctcggcctgggattacaggtgtgagccacagagcccgactgaaaataggtttttttaatagccttagccaattccatcattcatacctaacactactaattacaacatagatttaacaatgccaggtaagggcacgcttctgaaatagaagccttgaagactcaagaaaaggtagaaaatggccaagtgcgggagctcatacctgtaatcccagcagtttgggaggccaaggcaggcatattccttgagctcaggggttcaagaccagcatggccaacatggtgaaacaccgtctctcctaaaaatacaaaaactggccaggcgcagtagctcacatcggtaatcccagcactttgggaggccgaggtggacagatcacatgaggccaggagtttgggaccagcctgcccaacatggcaaaatcccatctctactaaaaatacaaaaattagccaggcatggtggtgcccgcctgtaatcccagctactcaggaggctgaggcaggtaaactgcctgaacctgggaggcagaggttaagagagctgagattatgccattgcatgccagcctgggcaatagagcaagaccctgtctgaaaaataaaataaaataaaaatgtaaaaataagccaggtacagtggcacatgcctataatcccagctactcaggtggatgaagcatgagaaatgcctgaacccaggaggcagaggttgcagtgagccaagatcacgccactgccctccaacctggacgacacagcaagactgtctcaaagaaaaaagaaggccaggtgcggtggctcacacctgtaatcccagcactttgggaggccgaggcaggcagatcacaaggtcaggagatagacaccatcctggccaacacggtgaaaccctgtctctaacaaaaatacaaaaattagctgggcatggtggcatgcacctgtaatcccagctacttgggaggctgaggcaggagatttgcttgaaccagggagttggaggttgtagtgagctgagattgcgccattgcactccagcctggtgacagagcgagattccatcttaaaaaaaaaaaaaaaaagaaagaaaagaaaaggtggaaaatataaagacttggataaggaaggtattatcctggcccttactataaaattcagtcactaaagaaagcagctaataaccatctcactaccataaaagcagaaatatacaatgtcacgctatcctggataatgaggagtcatagaaatcccctacatacccttcactgcttttgtgtttttctgaagttaatgcaaacagagaagcaaaacaacattaccagcagtttcagaggatgtgggattcacttcttgatcatttctaaataattttccacctcctccatgcctctatgattgcaactgaaactaaattgcaacaataattagagacaatcaagtagtgtggcaacggagcaaatggacaggttcaggcaaagttcttttctttagaagcccactctgaagactttcatcttggagaggagagcaggaaaggtgtggaacaataacaggaaagcagactcgaccagactcgacacggctctcaagttgaagtcttccaccggtccagcacaatacacagagatgtttcatccctttcatctctcctgttccaaatgacctatgatgtgtgccccccatacttgaaataagaaggcaatcttctaattcttactatagaataagtgtcctaactgatcgtgaatgcaagaaatactgaagaaaaaatctgtttgacataatctcttttgattaacacatggaacatttagaaaggagcaggtatgagccataagattccagaaactgaagtgttttgttttgtttcgtttttgtttttgttttttgagatggagtctcactctgtcgccaggctggagtgcagtggcgcgatctcggctcactgcaacctccgcctcccaggttcaagcaattctcctgccttagcctcctgaatagctgagactacaggcgtgcaccaccacacccagctgatttttttatttttattagagacagagtttcacaatgttggccaggatggtctcgatctcttgacctcatgatccggccaccttggcctcccaaagtgttgggattacaggcgtgagccaccacacctggcctgttttgtttttgagacatggtctcactctgttgcccaggcaggagtacagtggcacgatctcagctcactgcaacctccgcctcccaggttcaagcgattctagtgactcagcctcttgagtagctgggatcacaggcaggcaccaccacacccggctaatttttttttgtattttagtagagatgggttttcaccatgttgcccaagctgctcttgtactcctgagcttaagcgatctgcccacctcgacctcccaaagtgctgggattacaagcatgagccaccatgcccagcctgaaactgaacagtttatcattataacccagaccaatacaatctgtttaattcacaggaaggtgtggtggctcatgcctgtaatcctagtactttaggaagccaaggcaggagaatcacttgaggccaggagttcaagaccagcctgggtaacacagtgagaccctgctctatttaattaaaagaaaaattatagtttcaaaaaaaaaatctactggccaggagcggtggctcacgcctgtaatcccagcactttgggaggccgaggcggacggatcacctgaggtcaggagtttgaggccagccttaccaacatggtgaaaccccatctctactaaaaatacaaaaatcagcagggcatggtggcgtgcgcctgtaattccgctactcaggaggctgaggcacaagaattgcttgaacccgggaggcagatgttgcagtgagccgagattgtgccactgcactgcagcctgggcgacagagcaagactccatctcaaaaaaaaaaaaaaaattaaattaaattaaattttctaaaaatctatttaattcacaatttcttctcgtaaggaaacattttgtagttggccagaagacaatatatgggttgagagatctttcatctttaaaagaaaaattaaaagaaaggtaaacgactgttacaattagccaaaatctaacctaaaccccagtcaaaactgatacacattttccccatgcttaaaacagtgacaaaaacctgtaaatcactttatttgatagaaaagagttaacctaagttaagtaaataaaccatcatttcttatgatgtagccagttcataatacacaaatatgcaaaataaaaatttttttcaatccagctagtgatcagtagatttaataagtcaccattttgtaaccaccaaattcagtttgtttgcttgtttgttttaaaaaaaaacttttaaaatgttgatcctcactgagggcacatttgcactattacaggtacgtgtactgatacattgctaagaaaagagtaaattggtgcagcccttttggaaaaagttggcaccagacatcaagaattctaaaaatgtttatactctgacatgttcatgtcaccctgagaatatatcttaaagaccacaaagtgtgtataattatggcaaccttatgttccagattttctaagaaggtgttcactgtaaataattgtgttcttttcaataaaggcaaatcagtaagttagtaactaagtttgagaataatggaagtcatccatatcatagaaaaacaaagaaaacgggttctgcatggggtcaaacatgcacagaagtgttctggtttctgtttgaaatggagagttgaggaaaaaaactcaaactcaccacatattaactttttacaagatggaacttggttcaatccattattccctccacagttgctgagctgcctctgtagggccccaggcaccatgcctattctggagacatggtgatgaaaaggcaaatctttcttaaatgcaacaggctcctctccccagcccgcagcagcacccagacatgccagtgcccagaccttatttttcttgttgaatcttctcaccacccacacacaggtctccatggtacagcatgacagctcttcctataattctgatataaatcctccttttatccagagtctttggtcacaaaccgtaatacatacatgtgaaatgttcccaaatcttgagtagacactcaagattatgcctgtgagaaaactcctttccatgaaaacacagaagaaactactctcttttcttatcaaacccccgaagtacccaccagggcattcggcatgggaaatcgggttagaactgccgcaaggcactgctccctcagacagcccaccacctgtggctggcataacggccctggacttgctgcctgctttccctctgtgccactaggcacccacccctgcagtcaccccagctcccgaggcatcacaccatccacagaccacagggttagtcctcctgaggtccctctgtgtgttatgacaccacacctaacccggcacagaaaccaggctgaacaccctgacagtctcctgtggcccatgaagattgggggggccgctgggggttaggggaagaggagagatggaaggaagttactaattaagagtgatcttgaaagcctcgggtgctaagggtcttttttctttttacccctgtcctgagtattcccttatatccttccctcaaaggccaaagctagagacagcagatacgtttttatgcaattggacctcaatgcttctcgaaatatgcgaatgaacaactttcttgaatgtcttaccccaccactcttcctctacagagaaagtgaaacctcgtttttttaattcttgctgaaaacactgctattttaacttgaaatttgttctttcttgttttagataatgaattagttctacctttcctgctttagataatcaatctgggaactcaatgtaaaaattacatcaaaggcaaataaaaagtaaggtatttcagaagctgaataagtaaaggacatttgcagacgtctcttccttttcatttgaaaactcacctaaaaattattttaaaattctctgttgacaacttccctaattgaagctaacttcttgaaaggaacaaaaataagacatgcatttgctataatgaacatgatagactccagcaactttcattttaaatgtttatatagaaattatgcttaaaggccaggcacggtggctcatacctgtaatcccagcactttgggaggctgaagtgggcaaatcacctgaggtcaggagtttgagatcagcctggccaacatggtgaaacctcgtctctactaaaaatacaaaaatcagccgggtgtggtggcacatgcctgtaatcccagctacttgggaagctgagacaggagaatcacttgaacccaggaggcagaagttgcagtgagctaagatcacgccactgcacttcagcctgggaaacagagtaaaactctgtctcaacaacaaaaaaaagaaattatgcttaaaaaggaagttcataattgaatcacggcaactgcagtcattagccccaaaatgatgaccattacagagcaacaggatgaacatactctctggaaaatcccgcaaatactcccttaaagtgcattatatgtggttttctgtttacaaccctgaacattattacacagaaatatatactggcaacagtacacacaagccaggcgcaatggctcacacctgtaatcccggcactttgggaggctgaggcgggcagatcatttgaggtcaggagttcgagaccagcctggccaacatgatgaaaccccatctctactaaaaatacaaaacaattagctgagcgtggtagcacacgcctgttgtcccagctactcaggaggctgaggcacgagaatcgcttgaacccgggaggcagagggtgcagtaagccaagatcgtgccactggactccaggctggacaacagagcgagactctgtctcaaaaaaaaaaaaaaaaaaaagtacacacagtatgcatgttataaagaaaatgtatgcaaaatttaatttttacgatttttttctttttcctgagcagaatagtattttcttaagttaatggtttgtctggtgggactccacagtgccataaacagtttttttttttttaaaaaaagaaaccaataggccaggtgcagtggctcacacctgtaatcccagcactttgggaggcctaggcagggggatcacctgaggtcgggagttcgagaccagcctgaccaacatggagaaaccctgtctccagtaaaaatacaaaattagccaggcgtggtgacgcatgcctgtaatcccagctacttgggaggctgaggcaggagaattgcttgaatctgggaggcggaggttgcggtgagccgagatcgccccattgcactctagcctgggcaacaagagtgaaactctgtctcacaaaaaaaaaaaaataaggccgggcgcggtggctcacgcctgtaatcccagcactttgggaggcggatggatcacgaggtcaggagatcgagaccatcctggctaacatggtgaaacgccgtctctactaaaaatacaaaaatttagccgggtgtggtggcgggtgcctgtagtcccagctactcaggaggctgaggcaggagatggtgtgaacccaggaggcagagctggcagtgagccgagattgcgccactgcactctagcctgggcaacagagcaagactccgtctcaaaaataaataaataaaaataaataaattaaataaataaacaaaccagtaaagatatatcccacacaggtgtagtctgaaccaaactgtccctatctaatgaatacaaaagagtactggaactgagaaagcctttttgttggtttttgaaattgtctttaattggacagagaaactctaagactctctttctatagcatattatcaatgagctatgttccaaaagttttttaatactaaaaggtagccaggaaattacaatgcatttccctccagaaagaattctaaagccgggcgcggtggctcacacctgtaatcccagcactttgggaggctgaggcgggcagatcacgaggtcaggagatcgagaccatcctagctaacatggtgaaaccccatctctattaaaaatacaaaaaaaaaaaaaaagaaagaattctaaaaacagtggtacctgtcctaggctgattcacaaaacgttaccaacttacgcagcagggacagggacagggacagaggaagcactgttgaaaacagcgcacacacaaagttaacaccacaagaaatgtttctcattattctgaaaatcaaatattaaggtttaggctgggcttggtggctcaggcctgtaatcctagcactttgagaggctgaagcaggcagatcaattgaggtcaggagttcaagaccagcctggccaacatggggaaaccccatctttactaaaaatacaaaaattagccagacatgatagcatgtgcctgtagtaacccctactcagaaagctgagggagaatcgcatgaacccaggaggtggaagctgcagggagctaagactgtgccaccacactccagcctgggtgacagaacaagactgtctcaaaaaaaaaaaaaaaaaaaaaaagggaaaaaaaattaaggtttaaaaagtttatttagggccgggcgtggtggctcacgcctgtaatcccagcactttgggaggccaaggcaggtggatcacttgaggtcaggagtttaagaccagcctggccaatatggtgaaaccccatttctactaaaaacacaaaaatcagccgggtgtggtggcaggtgcctgtaatcccagctacttgggaggctgaggcagaagaatcacttgaacccagcaggcagaggttgcagtgaaccaagattgcgtcactgcattccagcctgggcaacacagtgagactccatctcaaaaaaaaaaaaaaaaaaaaaaaagaaagaaaaagtttaattaggcctggcacagtgactcaacccaacactttcagaggccaaggcgggaggatggttttagaccagcctgcgcaacatagtgagactctgcaactatttaaaaaataataataataaaaagtttgtttaaaagaaaacaatggaagttctgaggtgacgtctgaacacgtcatgttatatgctttatgaatccatcacacacatttccttttacaatgtgggatctggtcaaggtaaattctctgtgaaacctatgagggaaatggacagttctggagactaacacaaaccttaaagaacttgggagtcttattcttcatatgatcatcttacaccatcaggtactttttgtgtggtgaccctctgggtggggaatcttcaatctttttagttcctccaaaataaaaggatgatatttaaaactgtagaaaggggaacaggccaggcggggtggttcatgcctgtaatcccagcactttgggaggcttaggcaggcagatcacctgaggtcaagagtttgagaccagcctggacaacacagagaaaccctgtctctactaaaaatacaaaattagccaggcgtggtggcgcatgcctgtaatcccagctactcaggaggctgaggcaggagaatcgcttgaagctgggaggcagaggttgcagtgagccgagattgcgccattgcactccagcctgggcaacaagagtgaaactccatctcaaaaaaaaaaaaaaaaaaaaaaagaaaggggaagaataaacttacaaactttctcatcttcgtgtgtggcagacagaataacagcccctaaagaagtccgggtactaatccccagaacttgtgaataggttaccttacatggcagaaggggaattaaggtaacagatggaattaaggttgctaatccttagccttgattatccaggtgggtcccactataatcacaaggatcttaataagagggaggtaggaggtcgagagaaatgagaagatgctacctgctggctttgaagatggaaaggggactatgaaccatggaacacaggtggcctctagaagctggaaaaggtaaggaaatgggttctcccctgagcctccagaaagaaccagcctgtccgacaccttggctttagcccagtgagacctattttggacttctgacagcagaaccctaaaacaaatgttatgttgttttgagccaccaggcttgtggtaatataacaggtataggaaactaacacgccctgcttccacttacctctttcaagtacaagttcatgtcatgcctggtggcaaagcagtcactgtattaaaagcaaccagaccaatagcttcctgcccacggcagcaggcaagaacacaagagaggccacaaaagcctggtaggcaggacactgggatctgagggaaattaaatggcaagaggaggcagagaaaagagcagcaggcaaaactgctgtcggcttctcagcagtgggcaggagtgaaatctggaggggctgaacaatcttttggggccagccagtgggtgatttttcttttaatcacaaaaggaggctgggagcagtggctcatgcctgtaatcccaacactttgggaggccaagataggaactggagttcacaccagcctaggcaacatagggagacctccctctctacaaaaagaaataaaaataattagcagggcgtggtagcccaggcctgtagtccaggttacaggaggggctgagaagagaggtgagaggattgcttgagccaaggaagcagagcgtgcagtgagctatgagagcgcccctgcactccagcctgcgcaagagagctagaccctgtctcaaaaacacaacaaaacaaacaacaaaaaaatgcacaagctgcttttacttgtttacttataaggtaacaagtgggctgggtgtggtggctcaggcctgtaatcccaacactgtgcgaggcagaggtgggaggactgcttgggtctaggagttcaagaccagcctgggtaacatggcaagaccccatcttttaaaaaagtaaaaaattagggctgggcgcggtggctcatgcctgtaatcccagcactttgggaggccgaggcgggtggatcacctgaggtcagaagttcaagaccagcctggccaacatggcaaaaccctgtctctactaaaaatacaacaattagacaggcgtggtggcacgcgcctgtagtcccagctactcaggagcctgaggcaggagaatcgctcagctcacccaggaggccgaggttgcagtgagccgagatggcgccactgcactacagcctgggcgacagagtgagactccgtttcaaaaataaaataaaataaaataaaataataaaataaaataaaataaaaaattagccgggcatggtggcgtgcgtatggttccagccactcaagaggctgacgtgagctacgatcacgccactgtgctccagcctgggtgacagagcgagatctcgtctcttaaaaaaaaaaaaaaaagaaaaatgtcccattagttattaaactagaattgggttccatttggccacagagttctgctttatttgtactttgctaccaaaccacaaaagttcaccacttgttctatttgccattcttccttttaattcctcatgaacaaacttaataaattaactacagcatgtcaaacaaccttttgcaacccttgcaatttcaaactcttggagggaggcacccctggcctgggccagcagcctcaacgcgcgggagcgaagggagcgggacagcggctccgcttgccaagtccccagtcaggggaggagcggcgtccccaccgcggtgcccctcgggctccacacccgcgtctcggcaggcggcgacgcaccggaccggcggctaccgggcccagactcccgcgggcagggccgtcccggagcccgcgcctcgccggcggcgccgctccccgttctcatttctgaacaaagacgtggaccgggcacaactcgctgacgccgagagcggccggaaactgcggggaacgcgggcccggccatccgcgcgtccgccccgagccccgcagaggggcggcagggccagcgacctccacccctcggccccccgggacccggactgcgacccctgccccggggaccccagcgaccccaacgactctcatccctcagagcccctgagatcctgccccgcgaccccaacgaccctcattcctcagagctcgcggcgacccctggccccgcgagaccgcgagcccggcctgtgacccccgccccagccacccacatccctcagcgccgccagcgaccccggccccggcgaccctcatccctcaaaaccccctgcgacccccgccccgcgagggccccgcgcaccgctcgcccgccggtcgccccgggctccgcgtcccgcaccagtgtccccgggaaacgccagccgccgcaagcgctgccggacggccgggcccggaggggactgggggacagcgagggggaagcgtccgccgccggggcgcactgaccgtagctgtcgtcctcctccatggtgcgggagccgggctccgcgctccggctcgccgctcgcgtcccgccgcgccacccgcgcccccgctcgcctcagcccggctcggagccccgcccccggcgccccgcgccccgcgccccgcccgcccgcgcctgcgcctgcgcccgccccctgcccccggcccgaggccccgcccctcgcccgaggccccgccttcctcccgcgcgcgccgcaccccgggtacccggcctcctcccgaggctccggcctgcgcacgcgcgtccacccgaggctcctcccctgcccccgcctctagaccacgcccccgtcccgagacacacacaccccccccccttctcccggtccgcctcctggggccgagcaggtttcggtttctgaagggcggtgcaagtccccggggtggcggactcgacctggcctgcagccaggctactgcacgaaagcccaaggtcgtgtccggccactgaagggcagggtggtccttgctgacgccaacctggaaggtcagacccggccccagcttgccagggagggcccggtccttggcgaaaggccacaaaagctatttgaagtcatttactcctgcgttcagaacctttacatgctgtatgtcctaagtttactgcttctacttctttttatttgtcctgagttttacctgggtcaagattgaaaggagggcacttcaagtcccagcgttttggattttatttatttattggagacgagtttcgctcttgttgcccaggctggagtgcagtggcccgatctcggctcactgaaacctccgcctcccgggttcaagcgattgtcctgcctcagcctcctgagtagctgtgattacaggcatgtgccaccaggcccgactaattgtatttttagtagagacggggtttcgccatgttggccaggctggtctcgaactcctgacctcaaataatccgcctgcctcggcctcccaaagtgctgggattacaggtatgagccaccgcgctcggccttctctttctttatgacagaggacaatcccactgctgcagaatgccagcaccagaacccccctttccccctgcagtcacttgtggctcctgcaccctacacagaacactcactgagaactccacagagatccctggactgctgggaattttttggaccaaccaaaaaacgggagtaaaagccacagaactctttccttgtgggcccacctgtcctgagttttactatttttctttttcttttatttatttattcattttgagacagagtctcactcgctgtgttgctcaggctagagtacggtggcaccatcatgactccctgcaacctctgcttcccaggctcaagcagttctcccacctcagcctcctgagtagctgagactgcaggcaccggccaccatacctggttaatttttgtattttttgtagagacggaggttgctaggttgcccaggctggtctcgaactcctaggctcaagtgatcctttctctttggtctccttccttggcctcccaaagtactggaattacaggcgtgagccaccacgcctggctggattcatgatct

SEQ ID NO: 142 - DNA, 78102 bp, Homo sapiens
  source 1..78102: mol_type = genomic DNA
agccatagcatgggtcattaggaggcttctgtccacatcatgtttcttttggtgtcttgttcctctagtgtcaggagtccttggctcatgcttaaaagttgaagttggaagcagttccctaggagggtcacaccatgtagcgagtccatcttgtacctttctgacactaggtgagtgcaggaattgggtttagaaacaaagcttgtagcagttggacgctgctactgttttttttttttttttttttttttttttttttttttttttgagacagtcttgctctgtcgcccaagctggaacgcagtggcacgatctcggctcactgcagcctctgcctcctgggctcaagccattctcctgcctcacctcccgagtagctgggattacaggtacctgccaccacgcctggctatgtatttatttatttatttatttatttttttgaggcggagtctcgctctgttgcccaggctggagtgcagtggcatgatctcagctcaccgcaacctccgcctcccaggttcaagcgattctcctgcctcagtctcctgaatagctggggctataggtgcacaccaccacacctggctaatttttgtatttttagtagagacgggtttcaccatgttggccaggctggtctcgaactcctgacctcaggtgatccgcccactttgtcctccccaaagtgctgggattacaggcaagagccactgcgctcagcctgctacagcatttcaattcaagttagacttatttctgtgagacagggtcttactctgtcacccaggctggagtgcagtggcatgaccgcagctcactgcagctgtgaacccctgggctcaagtgtccgcctgcctcagcctcccaaagtgctgggattacaggtgtgagccactgcgcctggcttgaagtttttaaagagccctttgcaggctttacaaagctctaaggtggcatggctgtgacagcagagaggccccaaggaggtgtcttctgaggtcagatttcccgggagaatcttctccttgaagacttgggagccaggaggggcacagtctccttccctcaactgcttgtgcccaggccccaccttccacctcagagcaaacgacaggccaggtttcttcccgctttccagcatacctgctctttagctgggcgtgtctgcatcactcccacttcacagctgcccagggtcttgtaagctggggtcagttcatgtctttccttcccccttaaggttctgtactgtgcgtcctctgactgttgttggagtgtcttttcccatcctgtgggtctctgcttttttggagaaatctccctcctgtcattctgttgggcttccggtgggagagggggtgaaatcagtgcttgggcaatcttccatctgtagccagaaccccagggtttaaaaaaaacgtggaaacatcattgctctacaaccacccagtatagtagcgctacctggaaatccccaataagagagcacgcagctgtacacacaagcactatggtgacgcgcgctttattgtttcaactcctgaatccactggccgaccccagagccagaagagtagcaagaattcaatcagcaactcctgatgtggacaaacaactgggcagtgggaataggcagttggggggctgtggctcggcggggccgggggctccacttactttcccgatcgggtttcgtcttcatccccagccagagcccagggctgcccttggtgacgcccaggagaaaaccccagcccgcaccctcaccacagttccatttgtacatccaggaagcccagtttgaaaaacaaaccacgcctgtaaactgagttggatgaaaagagctgccttgggggtgggaggctaaggaactgttcacggtcttctgggtgggccctggattcccgcacttctggagcagtcctcagacagccaagggatccatccacgggccagggcttcccgaggctgtctccacggtcgctgggtctcaggagtcgtcctatcacctgagcgtgctcactacttctgctaccattatggccacaatgacttcccataaacttaagtcattgagaccatggaattctgttcccatccgattcctgttgatggacattcgctgttttggcgtcatgggaactcctcggatggtaagtcagtttaaggacaaaagcgtgagtccatcgttcctgggacagtttccagtggccctggtcaggccacgtccacactggagaccccttgtgctggacaggagacgcaggccgctctgtcggagaccacgctgtccaaggcccgcatcaggatgtctggcatgtggtcggtgagcatcttcggacctatgagtattttgctgaattccgcttcgtgtgaccacttggcgctatagtgagcagcagagcagcagccaaacctgaagcagaaaaggagagacagctcccacgcggccccagggctgaccccgcgctgctcctgcctgcccaccacacccaccacgccgcactcaccgccccgaggcgccctcctcctgcaggtggatgatcctgccgggagggtagagaggggggtacttgggagaagagtccagtggggagtcgctggagaagctgtaggccggggaccagcgcgtcagtaggctctgctcccccagaagaggctgtgtcaggacttcctggtcgcccccgtccagctccgtgggcaagttgttggggtttcctccaaacagttcgtaccacaaaccgtgcagcaagatcttgtactgagggcgagacccaatcagtagaatgctgtcactcaccctctgtcacccgagacctcccgaaacaccaaggcggaccaggcacaggaatctgccctttgacccagaaaccccgcttggaagactccagcaaagatgcaccggcgagctgtgctgggtggcagccacctcggctcaggacaaggctctatgcctagtcacagatcatgagtgtgggctctctcttgggcagtaaaaccatcacacgtggagcaatattaaaaactaagccatacagactgtgagggatatttcccttaattattttccggcaattctggaaatcagctttacccttccttccctgaaaggcattagatattaatttctatgggctggagcgcaatggcgtgatcttggctccacaatctgcctcccgaattcaagcgattctcctacctcagcctactgagtagctcggcttacaggctcctgccaccatgcccggctaattttttgtattttttttttttttttttttttgagacggagtctcactctgttgcccaggctggagtgcagtggcacaatcttggctctctgcaagctccgcctcccgggttcacgccattctcctgcctcagccaccagagtagctgggactacaggcacccgccaccgcacccggctaattttttgtatttttaatagagacggggtttcaccgtggtctctatctcctgacctcgtgatccacccgccttggcctcccaaagtgctgggattacaggcgtgagccaccgcgcccggcctaattttttgtatttttagtagagacggggtttctccatgttagtcaggctggtctcgaactcccgacctcaggtgatccacccacctcagcctcccaaagtgctgggattacaggcgtgagccaccgggcccgccctagatactaatttctaaaaaaaattttaggctgggcacagcagtggctcacacctgtaatcccagcactttgggaggtcaaggcaagcagattgcttcagccccgaagtttgagaccagcctgggcaacatggtaagaccctgtctctacaaaaaatacaaaaattagccaggtgtgttggcgcatgcctgtagtgtagccccagctactcaggaggctgaggtgggaggatcagttgaacttgggaggctgcaatgtgccgagactgcgccactgcactccagcctgggtgacaaagcgagaccctgtctcaaaaaagaaaaaactgggggaggtaattggtaaggagaaaaatttaaattgcgtttcttctttctgattaggaacaaaaccatgagaaaggtcagaaaacaaagggattaaacaagtaaaaatcatctctaccgacactaaacaaaaccacccttggcatacgtattttcaaatttttgtcaaaattcatatatctgtatctccttgtccccactctctgccatgagtcatatctcttaagaataatttttaagttttttttcttttgaacttttcaatggatatctatctttatcggcagacagaaatttcttctttttggagacagagcctcactctatccaacaggctggagtgcgatcttggcttatgcaacctcggcctcctgggttcaagcgattcttctgcctcagcctaccaagtagctgggattacaggcactcaccaccacccctggctcatttttgtatttttactagagacggggttttgccatgtcgaccactctggtctcgatctcctgactcaggtgatctgcctgccttagcctcccaaagggctgggattacaagcgtgacccaccgcgcctggccagcagacataaatttctaccaccatgttaaaaaacccttgacgtggacatatatcaccattttaataactgcatgatatccacagtgtagataaatgtgcctgtacctcttaaggtctatttggcagccttgctttctaagctttcggacaacaaagccaaaaggcattaacaaactgttagtcacaagacaggactaagaagtttgtcagaaagcaaaatcaaacagttcctccagagtattttcttttctttttttttttttagaatagagacagggtcttgttgtgttgcccaggttggcctcaagggatcctcctgccttggcctcctgaggtgctgggattccaggcatacaccactgctcccagcccagatcctgtttcctccctgtgacatttcccgcacttgctgcagccatttgctttcttagacatcacagagtcctagcccagaatctgatcagatggtggaaggagaacttccagcaacagcatagagtgccctgcactgagggtgcaattcctcccggctctccacaggatctcagggacaggccccgtgtcctgctgaccctctcaacaaggcacccgcttaccttgggtttattgcagtgcgcgaccactcgcaagattcttctcttcagatcttccaagttggtcacactgagcctgtttagcaaaggggcacactgaggctgggacctggcactcccaaccccccagccctgggcacagcaccaggtgggcttacctgggaatcacatccttccccaggacgagtgacacgatgaagctctgagaatattcctgcagagctttgctgaaattccaaacagagagaggatgttagctttacgatgacactgcccacaagggcttccatgaaagaaatcagtaacactgaggggttaggttcccaggcctcagctctgttctctcttctctaaagggagggtaggggaaacgtcagttatggcaactcactggccagatcctactaaagccacaatatgtgttcaacagagacgccccgcagctaaaaccgcaaactggacaccaaggcggaccaagcacatggatctgtcctttgacccagaaaccgcgcttggaagactccatcaaagatgcactggaggccgggtgcagtggctcacgcctgtaatcccagcactttgggaggccgaggcaggcggatcacaaggtcaggagattgaaaccatcctggctaacacggtaaaagcccgtctctactaaaaatacaaaaaattagccaggcgtggtggtgggcgcctgtagtcccagctactcaggaggctgaggtaggagaatggcatgaacccgggaggcggagctggcagtgaactgagatcgcgccactgcactccagcctgggcgacagagcgagactccatctcaaaagaaaaaaaaaaaaaaaagatgccccagcaaaaatgaaggggcagaggcaacaggcgattcactgcggcagaacctgcaccggcagaggctggagcctccaaacacccatccacagaactgccttcagctcccaacaacgagtcacataatagtgcgtcccgcacagctgggagaaggaggaggactgtgtgtgccactgcggggtcatctcaggacatgcggtgaaagtgaacagccacgaccagagacagaagagcagggaaaaggtgcaggctttcatcaacaggaggagaggaacacagacacgcttccttccagccatggacataatggaaacaccagtcaaaaccaccacattctacctctggggtgacagaaaggacttttttgtttttgagatggagtctcgctctgtctcccaggctggagtgcagcggcacaatctcagctcactgcaacctccatctcccaggttcacgccattctcctgcctcagcctcccaagcagctgggactacaggcgcccaccaccacgcccagctaattttttgtatttttagtagagatagggtttcaccgtgttagccaggatggtcttgatctcctgacctcatgatctgccggccttggcctcccaaagtgctgggattacaggtgtgagccaccacacccggccaattttttttttttttcttttgagacggagtgtagctctgtcacccagactggagtgcagtggcacgatctcggctcacggcaacctcttcatcctgggttcaggcaatcctactgcctcagcctcccgggtagctgggaccacaggcacacgtcaccacgtccagctaatttttgtaaggaaccgggtctatgttgcccaggctggtctcgatctcctgggctcaagtgatcctcctgcctcagcctcccaaagcgctggggttacaggtgtgacccaacatgcccagcctcctgatgtttaagtatcactatacactacagttacattttctctttggtgtaacaaaagcctttcctacctctttccaatgaaaaggcctggaaattatgaccagccctgtggtaatgagaactaccagtgccccgatttcagttcagaaataccatttcctgctaaaaggaaccaatattccttggagaaacggttgattccagatatggacgatggaaaaaaaaaatacttgctcatttcaagcccaaaacttgagaatattcttgagaaagcaagaaaatgaggccaggcacagtgctcaacacctttaatcctagcactttgggagggtgaggcaggaggatcacttgagcccaggagttcaagaccagcctgggcaacatagcaagaccctgttccttacaaaaattagctggatgtggtggtgtgcgcctatggtcccagctacttgggaggctgaggccggaagatcacctgagcacaggaggcagaggctacagcaagccatgactgtgctgctgcactccagctggggagactgagtgacactctgtgtcaattaaaaaaaaaaaaaagacagcaagaaaacagacgactgaaatttaagttttaaaaaattaatgtctgcctctgtagactgctaggcaacaattcattattctgaacacttctttattgagggaaagatttaagcacttatacattctcctgttttttcctgtgtgaactatatgtcaaagaaaccaagtgtgcgaagaaaagctctttttgttctttacgtacatactttttaatcatcccaaagggccgggattacaggcatgagccaccacgcctggcctttatttcattttaatgaaataaagtggtataattttcctttataatcatggcaaaaggttacacagaacagtcagtatgctggaatcagcaaaaaaaaatataaacttttcagccaggcgtggtggctcatgcctgtaatcccaccattttgggaggccaaggtggcggatcatgaggtcagaagacaggagatcgagaccatcctggctaacacggtgaaacccgtctctactaaaaaaatacaaaaaattagccgggtgtggtggcgggcgcctgtagtcccagctactcgggaggctgaggcaggagaatcgcttgaagctgggagacggaggttgcagtgagccgagatcacgccactgcactccagcctgggcgacagagcaagactccgtctcaaaaaaaaaaaaaaaagtaattttcaaactcataaaaatgtctttaaacatgtgcattatgcatgtgtccccacccagggcatatgccccccgagagggcggagggagtgctcagcatactacgggctctgggcgatgtgcctaccaggcgcatggatgtcaacaaccggacccctctgccagggctgtgagaatgggggaggttgtgcttgcttgtggggagggagggtatgagagatccctacaatctgctgctcagttttgctgtcagcctaaaactgctctaaaaaataaagtctgtttgaaaaaagactcttagaattaaatcattgaggaaattacaggtatggtcacataggtctaagaaaggctagacagactttcttctgtgaaatagcgcttcaaaacacaaacctcagctgggtgcggtggctcacgcctgtaatccctgcactttgggaggccgaggcgggcagatcacttgaggtcaggagatcaagaccagcctggccaacatggtgaaaccccaccactactaaaaatacaaaaattagccggcatgctggcgggtgtctgtagtcccagcaactcgggaggctgaggcagaagaaccgcctgaacctgggaggtggagcttgcagtgagccgagatcacgccactgcactccagcctgggcgacagagcaagacttcatctcaggaaaataaaagaaaaaaaagatgagtcttgaccacatgacttgtaagtagcaagctgttagagcaggaaaacaaaggctcacctccacagcccccggggtggggagaaggcgtagcacctgacctgcgggtaggcggctctgagcatggtggccagcagggcggccgccccgcccccgaggctgtggcccactatgaccagccggtactcctagaggacagacagcagaatgaggtgaagggtaaaaacaacagctccaaagaggacaaggaaagaaacgttaactaagatctcacaggagcaatgctgaaggcttggctcaaaatcccgtcgttgatgagtcgttggtaaacgtatctggcagcttgagaaataccctaaaaacacagacaaagaaggtggccgttaatcctcagacaaggcaggcccagcagagactcaaagatgggatgacgctgtgcactgatgtgtgagtctctcctgggatctgagactgcagaatcagcagccacgtccatcgtgcatggctgtgctcctggcaccttgcacagcgcctgacgtgaagcaggtgccaggtgtggtggcgcacgcttgtaatcccagcacttagggaggccaaggcaggaggacacttgagcccaggagttcaagaccagcctgggcgacatagtctctactaaaataaaaatacaagaccagcctggatcctgactctactaaaaaaaaaaaaattaacggggcttggtggcgagcgcctatagtccagctactcgggaggctgaggtgggagggtcgctggaacacatgaagttcaggctgcagtgagttatcgtcgcaccactgggcagcagagtgagaccctgtctcaaaaaacaaacagacaaacaaaaaacccaaaacaaccaaacatctttccacagatacatttctgtggctttttctgtagctacaccgttttgtgctgtgtgaacatatcacaatttacttcagccaagttcctacggctggtcagatttagactttttacataacatttaaacataaagttctaccgctgtgccaagtggctcacacctacaatctgagctatttgggaggctgaggcaggaggatcacttgaacgcatgaggttgagaccagcctgggccacatagcaagaccccatttctctaaaacaactacagaatccacgaagttctgaatcaaagacactgataagcatccactgttcctgcaaaggtaaaactaaaccatcagaagtgagttttagggtggtcaggtttggctttaacttcaaaaagtaaataaaattttatttatttatttatgaatgaatgaatgaatgaatgacagtctcgctctgttgcccaggatggagtgcaatggggcgatctcggctcactgcaacctctgcctcctgggttcaagcaattctcctgcctcagcctcctgagtaactgggattacaggcatgcgccatcacacccagctaatttttgtatttttagtagagacagggtttcaccatgttggccaggctagtctcgaactcctgacctcgtgatccacccgcctcagcctcccaaagtgctgggattacaggtgtgagccactgtgcccagcaaaaatttaaaattttctaacatatacatctgtcctctgaaacaggcttcttgaaaattaagcaggtggctcatgcctgtaattccaacactttgggaggctgaggcaggaggatcacttgagcccaggagttcaaggttacagtgaactatgattgcaccactgcactccagcctgggtggcacagtgagactctttctgaaaaataatcatcataaaaataataaataaaagaaaaaaaataaagccattccctacacgcagttaagccctaaaaaaatttttaaaaaagaaaagcagtgccagggaagaaatgaccctgtcaatcaaaaatatcttcaaaatgcttcctcagtgtgctcctgtgctgggctcggagaaaagcgggcctggcccctgtcccgtgcagcttcgattctaataggacggggtggaggaaatcccacagaagatgggagatggtttttgatcatctctaatccaactacaagtttctttttttgttttttttttttgagacagagtctcgctttgtcgcccaggctggagttcagtggctcgatctcggctcactgcaagctccacctcccgggttcacgccattctcctgcctcagcctcctgactagctgggactacaggcgcccgccaccacgcccggctaattttttgtatttttagtagagacggggtttcaccgtgttagccaggatggtctccatctcctgacctcgtgatccacccgcctcggcctcccaaagtgctgggattacaggcgtgagccaccgcacctggctgcaactacaagtttctaagaattaaataattctacaagtagaatgctgaacccagccatcatataagaaaatttttaaaaaggcttcaacactctgtgtgcattcagatggcacttccttttttttttttttttttttgagacggagtctcaggttcaagcgattctcctgcctcagccacctgagtagctggaattacaggcactcaccaccacacccggctaatttttgtattttcagtagagatggggttttaccgtgttggccaggctggtctcaaactcctgacctcaaagtgctgggattacaggtgtgagccactgcacccggccctgacagcacttcttaacaaattaccagatgccctttctctctcctgcgacggcgggatgcagtcaactccaggccacactcactgggcacctaccctgtggctggtgctgggcaggcagagcccagcaggacgtggactaagctgctgctggcgagcctccccggcgcacatccaacaacaaatgccaaagccctttcggccacacaggtttggagtccaattaccgtggacagcgtcagagccaaactcagcgtgatttggcacaaatgaagccaagaggacaggacaggccctgagcggcagccttcccgacccaagggatgaactgtcactaaaatatgaacccagcacttgggggcctcagctgccagccaagccgcggatcctcagcttgtggtcacataaagcctttgcctgagcagatccacccaggccaagccccctggcccctgacgggtttctggggcatctctgtactaaggcttacagttcctcctttcctcacacagtaatgggcaaactggagtcttttgtgaactggcatacaaaaaagacagcaaagggccaggcgtggtggctcacgcctgcaatcccagcactttgggagactgaggcaagaggactgcttgagcccaggagattcaagaccagtctgggcaacacagagagaccccatctctacaaaataaaaagtagaaaattagccaggcatggtggcacacgcctgtaatcccagctacttgggaggctgaggtgggaagatcacttgaacctgggagatggaggctgcagtgagctatgatcacaccactgcactcaagcctgggtgacagaacaagaccctgtctcagaaacaaaaacagtccaggtgcggtggcttatgcctgtaatcctagcaatttgggaggctgaggtgggtggatcacgaggtcaagagatagagaccagcctggccaacatggtgaaaccccgtctctactaaaaatacaaaaatcagctgggtgtggtgacgtgcgcctgtagtcccagttacttgggaggctgagacaggagaattgcttgaacctgggaggcagaggttgcagtgagctgagatggcaccactgcactccagcctggacgacagagcaagactccatctcaaaaaaaaaaaagaaaagaaacaggccactgacaaaaggacaaatcctgtacgattccacttctgtggggttcccagaagagacgacttatagagacaaagtagaacagaggttcccagaggccgtggaagggaggaagcggaagtgagtggtgatgggttcagagcttgtgttaggggtgtgggactggacacgggttcacggcactgtgaacgcactggatgcccggaactatacactaacgaccaacgaacagtgaaactgaccaatgtgtgtcaggaatatctcaccagttacaggaagcccccaaaactagaaacccctacccctctactctgggcagggggttttcattccttcgggaggagctgaggcagcctcacacccatagcacagtgagcatgaaactgtaagcctggcaccgtgccatctgccatctgcacagagaatatgtgaatgacccggcagagcgcccgtggggtgggcctgcctcctgagaccctggtgcgcactctctgctgctctgagctttgatgaagctgttcttcaccatgagaatgtactacctgaatgaattcagaggctgggtgtggtggctcacgcccgtaatcccaatactctgggaggctgaggcaggaggattacttgagcccaggaggtcaagaccagcctgggcaacacagggagactgcctctcagaaaacacacacagagagaaggaaaagccacagagctgggctcaaatgcccaacctgctacttattccagtagccacgcgactttgggcaaggcactcgctctctctgaacaggcttctctctcttagaacaaacgaaatcccacagcctcccagggctgctgtgagaatcaggcagcgcgggaggcgcaggcagcgcgggaggcgcaggcagcgcgggaggcgcaggcagcgcgggaggcgcaggcagcgcgggaggcgcaggcagcgcgggaggcgcaggcagcgcgggaggcgcaggcagcgcgggaggcgcaggcagcgcgggaggcgcaggcagcgcgggaggcgcaggcagcgcgggaggcgcaggcagcgcgggaggcgcaggcagcgcgggaggcgcaggcagcgcgggaggcgcaggcagcgcgggaggcgcaggcagcgcgggaggcgcaggcagcgcgggaggcgcaggcagcgcgggaggcgcaggcagcgcgggctctgtgcagtccctgacccgaggcacccatcttctgtgtggtcagcattcacaggcaagacacacgagtccgcgctcataccttgtgtgccaggcggtcctgcacctcacactccacgtccagcacctcactctccgctgacaggtccgtaaggacatcctgtaaaaagggcgttgcagaagcggccgtcagcctgtgatgggcagggtgggagaatgacaggtggtccctgctcctgacacttctgtggaggatggcggggatggcaccatctcctagttcggtcctgggactgaaccctaaactaaagagggaaacccagcggtggctcctgagggccctgatggcacgaccagctctgggccaggcgtgaagggtggaggggaccatggagtgtgcctaagacacgccctgcgccttccccatcacacacacgtattctaaggaccccgtggcacagaacctgtgccagggttctgaacaaagcctggttcccgtcctcaggagccccgtaacaggtgaaaccgtggagaggaggaggcctagactagcaccacagcaagggccaggcagtgccgagtcagaggatggggcacagcccaggcgcaggggcagctccctggaggaggtgacgccacagccagacccgaaggaagaggttgttgtgaaagcagagaggacaggcggcgtcctcccaacaggggcagcaggacccgctggctggggccctgggcacggctccacaccagccatatttgaaaaggtccacaggcgagtgctgtgctgctgggctggaggccccggcagcagcgtccaggctgcggagtgggcatgggggaggctgctgggtaaagcacccagagctgtgataagaaacacaaacttgatgttaaagacagtgggcccaagcatagaaaagcgcaaaaacacatcctctgcagcaacggatgcagctgcgggccatcatcctcagcgaattaacgcagacagagaaaagcaaacaccgcatggtctgatgcgacggtggaagctcaacattgggtattcatggacacaaagaggggacaatagacactggggctactagaggagggcaggggaaggaatgaaaacctaaccactgggtactatgctcagtacctgggagacgggatcaacagtaccccaaacctcagcgtcacacagtatacccagctacaaatctgcacatgtaccctctgaatctaaaataaaagttggaattaaaaaaagaacatttaaagataaatccataaaggcaatgggaagccactggaggtatctgagcaggacggtaagatccgatccgtgttctagagtgagtccttggtggacaggacaatggacagacgctgaggtgagtggatggctacagcccaggagtccaagaccagcctgggcaacatagtgagatcctgtctctacaaaaatagaaaaaattagctgggtgtagtggcacatgcctgtattcccagctacttgagaggctgaggcaggaggatcacttgagcccaagaggtggaggctgcagtgagctgactgtaccatcgtactccaccctgggcaacagagcaagaccctgtcttagaaacaaacaaacaatcaaacagactggggagatgagactagacaaggacggagatgggaagctagaggactggggccaaaagcggggccatggcgctggaaatggagagagggccacataggctggggcaggaagttcacacacagcagacagggcgcacagaaaccacagacgacgccactgcttcttttgagacagagtctcgatctgtcgccacgctggagtgcaatggcgcaatctcagctcactgtaacctccacctcccgggttcaagcaattctcctgcctcagcctcctgagtatctgggattacaggttcccgccaccatgcccggctaattttttttttttttctgagacagggtctcactctgtctccaggctggagtgcagtggtgcaatctcgactcactgcaacctccgcctcccgggttcaagtgattctcctgcctcagcctcctgagtagctgggactacaggagcccaccaccatgcctggctaattttctgtatttttagtagagacggggtttcaccatgttggacaggatggtgtcgatctcttgaccttgtgatccacccaccttggcctcccaaagtgctgggattacaggcgccactgcttcttaaatgggcaatggggggacgatggcagagctgacgtgaacagggcgccccccgggaggagcagccctgtgggaagtgtggcttctctggtgcctcccgggagacccacagatggctcctgaagatgcaagtttggggtcctggccctggacttaggggggctaccccagagccagtcaggagcagaagagggctgagcacacaggctctggagtctcaactcattttctgggtcagcagagaagaacgggaagtgagactgaggagtggccaggaggaaaccggaatggagagaagaaagctttgacaaggaaagcgtcacctggcatctccaaggggcccaggagtatggactgaggaagacagaagaggggccatgggctggggatggatgtcggcagtcctgacctcacctggagaacggcaggccacgagggcctgtgaggatccaaaccgggagcctccagcggggctggtggccaggggcgtgactctctgcagcaagactgactcactgccgccatctggctctggtgcagaaattccccgggagggctcccgggtgtggggcctggctgggctcagggaagttaggcagggaggggtcaagcaggtgccctctgggagctcctgtggcgggggggccaacctgctggccgctctgctgctgacagttctcagtgaagatgaaacagcttcatccctttttgcaaagggagtatttcccaaccccaggctcacatcctcattttctgtcctcaccattttcccctgtgtctcatgcggttactgacggatttccccagccgagcagctgtgggctcccgctcccgcacccactcccagggctggaaagtcaggttccaacgttacctgcagagacatggtccccctcacagcgaccacaacagactctttcctgtgatccagagccactaaaaacggcagctcgtaaacctgcaggagcaagaaacaagcatggggcctaaacagtgaacacacgcaccagcacgcaaagtcggagccctgcagtgtctgcaatgacagcccaagtcctgcggcacagagaggaggggacaccgcctctccactcacgctcactacacagtgggacccactctggcagggactggccttcataaaccatgctgctctacatgaaaaaggatctttgttttcttagcctctctctgacctccccagagattcggattgaactggcccagggtgcggcctggacctcagcagtgttaaaagctcctcaagaggttctactgggcagcaaagtgggagagccgccgatctgcgccagcaggcctcccgctgcggtgcctatgagaatcacctggagagacagcgagcgacactgaacacgcagcactgcagccatgcacagctggcttttttttttgagatggcatcttgctctgtcacctaggctggagtgcaatggcgcaatctcaactcactgtaacctccgcctcccggattcaagtgattctcatgcctcagcctcccgaccagcagagactacaggcgcctgccaccacgcccagctaatttttgtatttttagtagagatggggtttcaccatattggccaggctggtctcgaactcctgaccttatgatccacccgcctcggcctctcaaagtgctgggattacaggcgtgagccactgtgcccggcccacagctggcttttgcagcttctcccaaggtgacagtgacccccccagagtgccagacctgctacactacactactgatggcactcacaacccaggacgacgatacgaatcccagaaggccatgcggcattaatactgagggatttcactcctcaacagaagggcgaggtaagaaacacagcgcgctatctctgatgaagacgtctctatcttatgtgaaacctgggttctgaacctgcaccagggcatctgtgtggctcccccagagtctgtggcccctctgaaatagtacacaggacttagaagtgtgtttgtgtgtctatgaattacgggaagaataattcataacttccatcagaatctctaacagctccaggacccaaaagaagtgaagagccgctgtctgcagcgtccacaccttgtcatggaagctgacgtggatgaagtccctgtactgcagccctgtggtgtgcaggatggagccgaagtgacagttgagctgatcgcctccgaccaagtcatagtctgtggttctgcttctgcagctaaaaagaggacaaagacgttactatgccgaacagagccacttggcaaggaacgtccatcctcactgccacatgttcccagagacgcgaggaccagagcggacaattctcaggacttagcctggctgacatggaatggctttttaaaacttaatttgatcgactgactgattgagatggagcctcactctgtcacccaggctggagtaccgtggtacaatctcaggtcaccgcaacctccgcctcccaggttcaggcgattcccctgcctcagcctcctgagtagctgggattacatgcgtgcacctccatgcccggctagtttttgtattttcagtacagatagagtttcgccatgttggccaggatggttttaaactcctgacctcaggcgaactgcccgtcttggcctcccaaagtgctgggattataagcgtgagccactgcactgggcccggaatggcttattaaagataatacctctctgtgtacacttcttggatagagttctgacttctggcatcatgttaatgatttctatattcaaaaaattcatcaacaaggatgggcaagtccctaaaactgaatgccaacagaagcaggtaaagcaaacctgtccaaatgaacagcacagccaactccgtagaaaataaacaagaaatcatagaagtaacttttgagtactgtgctctacgtttaaaaaacaaaaagaggccgggcgtggtggctgatgcctgtaatccggcactctgggagatcgaggcaggtggatcacctgaagtcaggagttcgagaccagtctggccaacgtgctggaaccccacctctactaaaaatacaaaactcagccaggtgtggtggcaggcgcctgtaatcccagctactcgggacgctgaggcaggagacttgcttgcaactgggaggcagaggttgcagtgaactgagatcgcgccactgcactccagcctaggtgacagagtgagactccgtctcaaaaaatacaattaaattaaattaaaataaataaaaataaaaactaaaaaaactacaaacacatcgcaaactgtacttagcagatgccctttttgtagtggaactgggtatagcaattctgaaactattttcttagtaataggggactgagcatgggtaactcacgctgatgttgctgggagccaagcttctctttgcagacatgatgtggagaagcaaagagaaactctgtggctttggactagaattaaaagatatcagggccaggagactgacacccatgatgccagcactttgggaggctgaggcgggaggatcgctcaagtgttggagaccagcctgggccacaaagcaaaactgtctctaaaaagaaatttattaatttaaaacatttttaaaaattatctgggtctggcagtgcatgcctgtagtcccagctacttgggaggctgaggtgagagaaccccgtctcttaaaagacaaacaaaaaaaagatattagtaaaatctcatgatctttaaaataaatacataggcgtggtggcttacacctgtaatcccaggactttgggagaccgaggcaggtgaatcacttgagcccaggaggttgagggtatggtgttacagtaagccgtgatgataccactatactctagcctgggcaacagtcccaaaaaaagaaaaagcaaaatccagaggttaggaagtgctcagaacatgatggggtcatatgaaaagaacactggagccagtctgcaggacaaaatctggaacattttgagcatcaaataaacactgtacttaatacaaaataaacagtcataattacaacccactgaataatttaagaatctataaatccatattgacagtaagatgtagggataaaaagctcttttttataggagaatgacaattaatgtagaagaaatgatgaatttagaaaaatcacaattttggccaggtgcggtggctcatgcctgtaatccaaccactttgggaggccaaggcgagtggatcacctgaggtcaggagttcgaccagcctggccaacacagcgaaaacctgtctctattaaaattacaaaaaactagccgagtatggtggtgcaggcctgtaatcccagctactcgggaggctgaggcaggagaatcacttgaacctgggagatggaggttgcagtgagccaggatcctgagactctgtctcaaaaaaaaaaaaaaaaaaaagaaagaaagaaagaaaaagaaaaatcatgattttgccaccatcctggtaataagtgattcagacaagaatcaatggatgctgtactgccagatgagaattcagagagggataggacatttacttacttgttttttgttttgttttggtttcttttttttttttctttttgagacagaatcttgctctgttgcttaggctgcagggcaatggtgtgatctccactcactgcaacctccaactccctggttcaagcgattctcctgcctcaacctcccgagtagctgtgattacaggtgtgtgcaaccatgtccagctaatttctgtatttttagtagagacggggtgtcaccgtgttggtcaggatggtcttgaactcctgacctcaggtgatcagcccgccttggcctcccaaagtgctgggattataggcatgagccactgcacctggtgggatatagacatatatatttatttaatttattttttaagacagcgtcttgctctgtcactcaggctggagtacagtggtgcaaccccagctcactgcaacctcagcctcctgggctcaagtgtttctcctgcctcagcctcccaagcacctgggactacaggtacacactgttacacccagctaatttttatatttttagtgagatggagttttgccaggttgcccaggctggtctcaaactcctgagctcaagtgatccgctggcctcgacctcccaaaatgctgggattacaggtctgagccaccacgcccggcctgggacaagatatttaaatggtctcaaggctggcagtcaccacctcagccaagcaatcaatgttaatataaccagaaatgggacaaactggcatcatgtatcccctgatatgatacactaggaaggatggttgtcatggaccattcccgccaaaaatgcaaaacataaatctaatcatggggaaaccatcacacaaatgcaaattgaaggcccttctacaaaatatctgcactgtcctcttcaaaatgtcaatatcatgaaaggaaagaacggctgagaaacttaaaacttgaaggagaccaaagagacacagcaactagatgtaacgcatcatcctggattggagaaaaaaattgctaaaaagggtattactggggctgggcacagtggctcacaccttgtaatcccagaactctgggaggctgaggcaggcagatcacttgaggtcaggagtttgagaccagcccggtcaacatggggaaatcctgtctctactaaacatacaaaaattacctgagaccgggcctggtggctgacgcctgtaatctcagtactttgggagggtgaggcaggtgaaccacaaggtcaggagttccagaccagcctggccaacatagtgaaaccccgtctctactaaaaatagaaaattagccgggtgtggccgggcgtggtggctcatgtttgtaatcccagcactttgggaggccgaggcagacggatcacgaggtcaggagatcgagaccatcctggctaacacggtgaaaccccatctctactaaaaatacaaaaaattagccagcagtggtggcgggcgcctgtagtcccagttactcgggaggctgaggcaggagaatggcgtgaaccagggaggcggagcttgcagtgagccgagattgtgccactgcactccagcctgggcaacagagtgaaactccatctcaaaaaatgaaaattagccgggcatggtggcgggcacctgtaattccaactactcaggaggctgagccagtagcaccgcttgagcctgggagacggaggttgtggtgagctgagatcacgccactgcactccagcctgggcagcaagggtgaaactctgtctcaaaaagagaaaaataaaatggttcggggaaaaaaaatacatgtgcatatatatatatatatatatatatatatatatgcaggggggagggagggagggagagagagagagagagagatacagcgcatgtgaccagatgagtcacagctggtgactctaggtaaaggattcatgggagttctttgcactgttctttcaaatttttgaaatatctcaaaatagcttttttttttaagggaaatatggctatggaggctcagactgtgccaacccaccagtcaccaccaatcctgcacagccccgtgagggggtttctgtagatgtagaggggccacccataggccgctgctgcaaactgcatgtaatgatggcagttttctaattctgcatccagatcagcttcctacaagagaaggacaaaaactactgtttattaagggaactcctgacacagaggatcaacacactgagacctgaaacctgaactcattcctgactcttcctgctccttcgttgaatagaactctcagacgcccacaggcaaaactgctccttcaataaggatgacatggactcctcatttttttttttttttagagtctcgctctgtcaccaggctggagtgcagtggcacaatgtcagctcactgctacctccgcctcccaggttcaagcaattcccctgcctcagcctctcaagtcgttgagactacaggcacccgccaccacacccggctaatttttgtatttttagtagagacggggtttcaccatgttggccaggctggtctcgaactcccgacctcaggtgatcaacctgccttggcctcccaaagtgctgggaagccaggcgtgagccaccacgcccagcctgactcctcattttataggaacacagcaagcacggggaagttaacagtaaaaaacactccaatgacttctctgctgtttttgctgaaatgagccggcgcttcctatctagatgcctgaaactagtacatttccatgccactgccacacacgagctgtcaagaactgagtggcttaacccggagcagcgaagatacataccgtctacgtgcaattttctttctcaaaaacataacaacctgtggcaggaaaattatcaccaagcaaagctgaactgcttctgcccccagccccagagaagaaagcaaacacacccagggagaatcgcagtccccatcccaggaggaattgttctaatgcatagaattgaacagcaaatttcctaaaacataagccttcaaagatatgataaatgtggccggatgcagtggctcacgcctgtaatcccagcactttggggggccaaggccggcaaatcacttgaggctaagagtttgagaacagcctggccaacacggtgaaaccccgtctctgctaaaaatacaaaaattagctgggcatggtggtgcacgcctgtagtcccagctactgtggaggctgaggcaggagaattgcttgaagtcaggagacagagggtgcagtgagccaagatcatgccattgcactccagcctgggtgacagagactctgtctcaaaaaataaaataaaaaataaagatatgatggatgataaagtggccaggaatgggttcccactacctgaactccagttgataacgaagatgcctcacctgacaggtgatgcaatacaaccagtggaagccgccaatcagattccaaccctgctgctaatgaaactgctgtagggtcctaggcttagtacctgggtgacaaaataatctgtacaacaaaccttcgtgacatgagtttaccggtgtaacaaccctgctcatgtacccctgaacctaaaataaaagttaaaaaaatgaaaaataggcccggtgtggtggctcatgcctgtaatcccagcactctgggaagccgaggcaggcagattacctgaggtcatgagtttgagaccagcctggccaacatggcaaaaccccatctctactaaaaatacaaaaaattagctgagtgtgatggtatgcgcctgtaatcccagctactcaggaggctgaggcaggagaatcacccgggaggtggaagttgtggtgagccaattgtgtcattgcactccagcccgagcaacaagagcaaaactccatctcataaaaagaaaaagaaaaaaaggggaggggaggctgggcacggtggctcacgcctgtaatcccagcactttgggaggctgaggtgggcagatcatgaggtgaagagatggagaccatcctggctaacacggtgaaaccccgtctctactaaaaataagaaaaaaaattagccaggtgtggtggcaggcgcctgtagtcccagctactcaggaggctggggcaggagaatggtgtgaacctgggaggcagaacttgcagtaagccgcgattgtgccactgcactccagcctgggcgacagagcgagactccgtcttaaaaaaaaaaaaaaaaaaggtgggagaggggagggaaggggaggagggggaggggagggaggggaaaggggaatgaaggaagggaggaagaaattgctataggttagctgtatgattctgaagacccaccaaaaggtgtaagtgtcagaactggacactccatgaagccaggctcacctgggagctccctggggcatggcagaccacctgggcaggctcttggttgttcctgatattgtcctgttgctgatgaagcagggcgaggcccgccgcaatgtcgctgggcaccagatctgtgtcctgggtgggaaaccacaatggcctgtcataaaacccagcaggcaccacccccgggttccctaaaatccagtcttctatagttgataggcattcacgcacacacagacatttctagacacagaggtatgttaaaaagactgctcctggcaggagtgcttctctatgtgacctgaatatgttttcacatcctgccctcagacaagtccactggagaatataaaaatgctattcgtctgtcttaaaatttcacttcatgtgactcaactatttttaatctacttcaaatattttgtaaagtggagaaatcaatggataaattgtccgtttttgtagcaatgcaccattttagcccacgtttatactctcatttctcaagatgctgggaaggttttgttgaaacacagtggatggtagagatttatgagactaaactcatactcacagggtatggcaagcctcataaaggaccccaagctgggaaagcaacagagagtgagtcttcttaggcctgacatgtcctttttctccaggaaatggaggaattaggaattctcaatcacctccgggtacttgtagcccgtaagaatggacaatatactgccaggtgcgatgactcacgcctgtaatcccagcactttgggaggccgaggtgggcggatcacctgaggtcagaagttcgagaccagcctggccaacatggtgaaaccctgtctctactataaatacaaaaattagctgggcgtggtggcaggtgcctgtcatcccagctattgtagtactctagctactcagtacgctgaggcaggagaatctctcgaacacaggaggtggaggttgtgccaagatggcgccactgcactccagcccgggtgacaaaacgagaccttgtctcaaaaaaaaaaaaaaaaagacaatatactggccactcagccactgagccatcagttctgcctgtgatgtagattacgacatcctctagaaataaccagcttctcttcttccctcttccagatatcttaagactaggtttaagcacttctttaagttactgaggggacacgcttccctcttccctctacggaggctgctgctatgacttggtgtcaggctccaggaccagccctgaatggtgccaagtcggatagcacagaggtgggaagagagactggcaggtgtgcaggataagcagagaactcttcctcccttacctcatctcagtatggaatttaacagcatttagcagagaatgtcatataaaaagatgacacgctgcatgtgaaaaaaaaaaaacaagcattttcaaattgcggaagaactcgctctagaatgacgctcccttctgtgctgcaatcatctattcaaactgtcttccaaaagtagcatcgtcgatcatttccatcatgatacaaagtggtaagaagtcactcactatctgattccaacctcgattcatgccactgcctgtgcttggtatctgctcaacagcagctgcaaattattctcaaagggtacagcgtccgttatgtggttccttacaggctaatccagcattttgacagggtagtgagtgggtgtcaatacgaagacatgtcctattgggacacagggtctgagaaggtgtggctcttgcagttaactgctccctggagggctcatcacagacagagggtctccggccaccccccacacacccaaagacaccaggttctcaaacgcggttttatgggaacagagggaccggctccatcagaagcatttactgaaacagaagaaacagaccaaaccagatcccctcggcttactgaaaagtaggttgagaaaagctctgccgtactcgaaaaagcaacccgagtatggtcgtctttcccaatgcaacagcacaagagcttgattctggtttcccacacgcttgtagctgctgtcttgaggccattaagtaactggcttgaatcatgactatccaggtggctggggccggcagaggaatatggagccattttccccccaagagggtcaaagacaatgataatggaaaccactgtggcagcgatgatgatccaactgcaagacagagagaggaaaaggctcggtgactgcgggccccagcccagacgcagatgtccggggtccctcctccaggttcagtttctgagtctctaccacggagggttctgttaccgaggaagatgcagctctcctggaacctgcctgaggcaagcaactttcttctagaaagttccttatgaggctgggcatggtggctcacacctgtaatcccagcactttgggaggccgaggccggcagatcacgaggtcaggagatcgagaccagcctggccaacatagtgaaaccccgtctctactaaaaacacaaaaattagctgggtgtggtggcacgtgcctgtagtcccagcttctgaggaggctgaggcaggagaatcgcttgaaccagagagtcggagattgcagtgagccgaggaggcgccactgcactccagccgggcgacagagggagactccgtctcaaagaaaaaaaaaaaaaagttccttatgaatcagtggttaacccaggccctgccctaacagtaaaggccacagaaggaacagggaggtgtccgctgggcagagttgcagcctgcgcccggatgcagcgggcacttcttctccatatggccctgggaccatgacatacgcccttccccttcggtgcctcagggctcttctcatgaaggtatcacagagtactctgataggcctctcatctatatgtttaaatatttcacactgcaagacgccggattgaggagcacacgcaaccgggaaatgcccctcccgaaggggctctgctgccccctggcggtgtgactcgagaaacgcagcaacagcccaggtctgattccttatttagaacagagggtgttaagggggcgggactggatcatctctaagatttttagcctagaaaacacgaaaaccttattgttctagaatattattccctgtcccacttctggacaccgtatctcttttcatacctttagttttagtttttgctctggttttggtctttggttttcttccgaattcttataagagaagggttaggaataaaagactttaagaaaaaaagaaaaaaaaaaaagagagagagacagaagggaatgtagaaaataaagaaccagtaaggaaagaaatctacatcaatacgtgcataacgaaagacgagttgtatttcatggacaaacagtgtctctaaattttcatgagttacgcagaaactaactccaatttctaactatttgaggaagtccgagggacgctggactctctgtcatgttagaagggtttgttcacctatgcctcaaatccactgaaactcaaagagaagaagggagatgtcacctgaccacgacggttgcgatgatgccgtttacaactgtcctgtcgcactgaacaccatctgccacccaggcagcccccagagaggcccagaccatctctggaaaaaacagcgccaggcggatgtaaagcagcttagacatagacttccgcggtccagggttacaaatcgttcctgaaatacaaaaaacgttccgactgctcagttgcttcctcagagatgaagagcttcctttttgcaaaaatacagcttttgcagagcatacatttgtactgtgcacacccgcctcctgactttttctacttataattggtaatcagcacctaagtcagacagcaagtgagaaaatgaggatgggaaacgtgacaagaagtcctgggctcttttttaagatttagcagggattaaaaacacttctgggttctcactggggtgacaatataatcatggcccaaactggtatacttctgagaggaaaaaaggggactattaataattatgctggggccgggcacggtgactcacacctgtactcccagcactttgggaggaggccaaggcaggtagatcacctgaggtcaggagttcgagaccagcctggccaacatggtgaaacctcatctctactaaaaattaaaaaattagcgaggcgtggtggcgggcgtctgtaatcctagctacttgcgagggaggctgagacaggagaatcgcttgaacccaggaggcggaggttgcagtgagctgagattgcgccactgcactctagtctgggtgacagagcaagactccgtctcaaaataataataataataataataataataataataatagtaataattatgctgagacaacaggcacaaaacagaactgtcccaggcaaacagggatatatggtcacccaagttctaacagccatgaaaacaagctccacgtccctttgagacctacattgttctagacaccaacctaaaacactttatgtgcgtagttctgtaatccccacaatgactgggttagtcattatctcattttacgtatgagcaagcaaactgaagctcagagagcgtaatagctaccattctttttggagacaaggtctcactctcttgcccaggctggagtgtggtggcacaatcatgactcactgcagcctccacctctcaggctcaagtgatccacccacctcagcctctctggtagctaggactacaggtgcacaccaccacgctgaaataggcctcatagtcccatagacagttgtttttttgtgggcgttttttggttaatttttgtttttgtttttttagatggagtctcactctgtcgcccaggctggagtgcagtagtgtgatctcagcttaccacaacctccgcctcccaggttcaagtgattctcctgcctcagcctccctagtagctgggattagaggcattacacctggctaatttttgtatttttagtagagactgggtttcaccatgttggccaggctggtcttgaactcctgacctcaagtgatctgcccgcctttgcctcgcaaagtgctgggattacaggcatgagccacagcaccctaccaggaaatagcttttaaattcaaaaaattatcttctgttagaatgactgaaatagttacattttaaaatattaggcactaacataaagaaggatgagttcatgtcctttgtagggacatggatgaagctggaaaccatcattctgagcaaactatcgcaaggacagaaaaccaaacaccgcatgttttcactcataggtgggaactgaacaatgagaacacttggacacagggtggggaacatcacacaccggggcctgtagttgggtgggggaggagggagggatagcattaggagatatacctaatgtaaatgacgagtaacgggtgcagcacaccaacatggcacatgtacacatatgtaacaaacctgcatgttgtgcacatgtaccatagaacttaaagtataaaaataatttttaaaatgcaaaaataaataaataaataaaatattaggcactaacagcctcatttttggcacaaagacaaaattttataagctaaataattgtaacactaacctctctgagggggaaagggtgcaggtatgtggaaaaaaaaaaacacagtcctatatttggagcttgttataacaatagccaaacaccccagagaaacaggaaacagtatctgcatacacactgcttcctggagggctgggattctaaaaacagacacatcctaatgtcagcagcacctggacttgaaactccaactgtgatgacaactgctgatactgcattaatgaaatacacagacaaggaatcaagagatggagttgctctgattaaggttccagaaaataagatattgatcccagcacattgggtggccaaggcaggaggattgcttgagcccaggagttcgagaccacgctggggaacacagagagacctcatctctgattattttttaaaaaagataatgatgatgatgatgatgatgatggtactgagaaaatctcctttacacggttttgcctgcctagaaaaaatttctggccgggtgcggtggctcacgcctgtaatcctaacactttgggaggccgaggtggatggactgtctgagctcaggggaggccaaggtggatggactgtctgagctcaggagtttgagaccagcctggctgacatggtgaaacctcatctctactaaaatataaaaaattagccaggcatggtggtgtgctcatgtagtcccagctactcaggaagctgaggcaagagaattgcttgaacccaggatgcggaggttgcagtaagccaagactgtgacactgcactccagcctgggcgacagagtgagactctatctcaaaaagaaaaaaaaagaaaaaaaaaaaaagaaaaactttcccttttatttttccttaagaaaaacagatgctagtatggacctggctgccgcagcaggcttcctaaggtcgctggccccataaccgacaagcacagctgcattcctaaatgtaatgtcctcaccactgtcttggttaagtaaccctatcatccatcatcagacacagccacttatggaagagcaatgaaaggaaggcctaggtcccagaatcagtacactcaactcctatagccaatgctgcaatcttctctgacccagcttagcaatgagctcttgggatacaaacacagaggagatacaaggaggcatcccacaatcaaagccacacatggcacaaggcagactttgtatgtcaaaagggttcttctgtcaaaacatggtagtcataagggtggaccatctccaatcaaacctcccacaaggtgcaacagtgggatttcatttgggaggttttcaaattaaaaatagaaactaggccgggtgcggtggctcatacctataatccgagcaatttgggagggcaaggcgggtggatcacctgaggtcaggagttcgagaccagcctggccaacatggcaaaaacccatctctactaaaaatacaaaaattagccaggcatggtggtgggcgcctgtaatcccagctactcgggaggctgaggcaggagaatcggtcgaacccaagaggtagaggatgcagtgagctaagatcacgccactgcactccagcctgggtgatggagaaagactctgtctcaaaaaaaaaaaaaaaagaaagaaaaagaaactaccacagtatcaaagttttcctcaaatgccgggtgcagtggctcaggcttgtaatccccagcactttgggaggctgaggcggcagatcacctggagttcaagaccagcctgaccaacatggagaaaccccatctctactaaaaatataaaattagccaggtgtggtggtgcatgcctgtaatcccagctacttgggaggctgaggcaggagaatcacttgaacccagaaggcggaggttgcggtgagccgagatcatgccattgcactccatcctggggactcaaaagcgaaactccgtctccaaaaaaaaaaaaaaagttttcctcaattgagctacagaagaagaggatcagtcttctggatggagaggactgaattccacctgctccaaatgttccctccacatcttgtgatgttcctttcagagaggagtatcagccaaaagctaaagaagcattctttcagctcagatgacaggctactgggacttgatttacgaaacaaaagggacaacagaagttagctatgtcggccgggtgcagtagctcatgcctgtaatcccaacactttgggaggccatggcgggaagttcgagaccagcctggccaacatggtttctacaaaaaaacacaaaattagacaggcatagtagtgtgtgcctgtaatcccagttaattgggaggctgagccaggagaactgcttgaacctgggaggcggaggttgcagtgagctgagatcccaccactgcactccagcctgggcaacagagcaaaattccatctcaaaatcaatccatcagtcaatcaatcatttatatttcctttacatgttcatgttctttgcccattttcctactgaccattggttttttctttgttttttttttgagggggggacggagtttccctcttgtgaaagtgctggggttacaggcatgagccaccgctcccagctttcgatacatatttttaataaggcatatgacgttatgtgtaacaaactgacaattttttttttttttttgagatggagtctcgctctgtcgcccaagctggagtgcagtggcgcgatctcggctcactgcaagctccgcctcccaggttcatgccattctcctggctcagcctcccaagtagctgggactacaggcagctgccaccacgcctggctaattttttgtactttttagtagagacggggtttcaccatgttagccaggatggtctcaatctcctcacctcatgattcgcccgcctcggcctcccaaagtgctgggattacaggcgtgagccaccgcgcccggccacaaactgacaattaaacaaacatttttttcttttttttttttttgagacagagtctcactctgtcgtccaggctggagtgcaatggcgcgatctcggctcactgcaacctccgcctcccgagttcaagcgattctcctgcctcagcctcccgagtaggtgtgactacaggggcccgccaccacgcccagctaattttttgtatttttagaagagacggggtttcaccgtgttagtcaggatggtcttgatctcctgacctcatgatgcacccgcctcagcctcccagagtgctggaattacaggtgtaagccaccgcgcctggccttcaatacatatttttaataaggcatataatgttatgtgcaacaaactgacaattaaacgaacatgtttttataaaatactgttttcagtttggctgggatatctctacccacaagttacagaaaattcaactcaaactggctgaaaagcaggaagggccacaatgactcgagcgactgagtgcagaagcaagacggcatcggggctgccctgaccgagacaagcctccatctccttgtgcttctcccagctctcccctgccctgtatgtcagcttgccctgcgctgtgagtggagacacagcttcagccaggagagcgacgataaatggcttttggatccttcctagaggggcaaggaagcacttccccagaaccttccaccaaactctccctgactctcactgggccaaactgggtcacgtgtccattcctgaaccaatcaccaatacgtgagcccggcctagggtctgcttctctgacgcatacttggtatgtgtgggatgggggcaaaacaaaacggggttctgtttggaggaggctgtgggatagacaacccagaacactccgacaacccacagatgacttctgagctctgaccacaagtacatgatgatgcaagcattgtacgagtgtctaggaagagggaacggagtgaatatgagcatccctcacagggaggtaaagacgtcccaacaccaaaaatatctcaacacaaacaaacatgtaaggaaaaaaaaaagtacaccgactgcttccactctgaccctgctattacagccacaaactcagtggtctaaccagaatgtgagatgaacaaaaaagggcaaataagttagataatgctgtatctgaaatgacaccagtctcaatacttcaccttcaataagaagcttcccagcgctgaagccacactgtacacatggtttctttctttccttaagcatctggcaccaatgacagcctacatttgggggccaacacaaacgtggagcctccatcaatccagcctccttgcgtggatgtttctagaggcatactaaaatacacagagctagctgggtgcagtggctcacacctgtaataccagcactttgggaggatgaggtgggtggatcagctaaggtcaggagttcgagaccagcctggccaacatggttcaactttgtctctactagaccaggtgcagtggctcacgcctataatcccagcactttgggaggctgaggcgggcggatcacgaggtcaagagatggagaccatcctggctaacacagtgaaaccccgtctcttctaaaaatacaaaaaaaaaaaaaaaaatagccaggcacggtggcgggcgcctgtagtcccagctacttgggaggctgaggcaggagaatggcgtgaacccgggaggcggagcttacagtgagccgagatagagatagtgccactgcagtccagcctgggtgaaagagcgagactccatccggaaaaaaaaaacaaaaaacaaaaaaaacaaaacaaaacaaacaaaaaactttgtctctactaaaaaaaaaaaaaaaaaaaaaaaagaaactgtctctactaaaaatacaaaaaaattagctgggtgtggtggcacgtgcctgtaatctcagctagttgggaggctgaggcagaattgtttgaatctgggaggcagaggttggttgcagtgagctgagattacgccattgcagtccagccctgggcaacaagggcaaaactctgtctcaaaagaaaaaagtaaaataaaatacacagagctctgttttctatgttactgtggtaatcaggcacatgccactcttgctggtcatcccaaaccctaaggtctttttctcatgaaagatgttgctgctaacatttctaccctctacattgctcctatgagctaacaccttttacatttcagtcctttattccaaactgtcaagatcttgatgccgtcactcactgtatcaccagcgcctcccagtgcacctcaccaccagcatatatctgatatgcatacctcgtccatcccaattcaagcagtgacaaaggactaaaacatggcggatggtggcatgtcacacagccctgcctctgaccaatgaatcatttctaagaatgcattcctttattagtcaccacagtgctcacatcatcctatgaagcagaggaatccaacagggaaggtttccaacacttctggagacattctcagataaatggttatctacagaaaactgtaacacatataaaaaatatgaagaataggtgatcagacgcggtggttcacccctgtaatcctagcattttgggagaccgagacgagaggatcacctgagcccaggagttcaagatcagtctaagctatatagcaagaccctgtctctacaaaaaataaaaataaaaaaaattagccaggtatggtggcacgtgcctgtacttccagctacttgggggttgagaagagaggattgcttgagcccaggtatttgaggctgcagtgagctatgattgcgccactgccctctagcctgggcaacagagcaagacactgtctctaacaacaacaaaatagttgtaaccctcacaatgtaaaaataaaagggaccaggcgcggtgactcacacttgtaatcctagcactttgggaggtcgaagcgggtggatcacgtgaggtcaggagatcgagacaagcctgaccaacatggtaaaaccgcatctctactaaaaatacaaaaattagccaggcgtggtagcgggtgcctgtaatcccagctacatgggaggctgaggcacaagaatcacttgaacccaggagacggaggctgcagtgagcagagagcacgccactgcactccagcctgcgcagcggagggagactctatctcaaaaaataaaaataaaaaataaaaggatcaatagcctagtctaaaattgggcaaaagatctgaacagacatttccgcaaaaatgatacacaaatgagcaataagcaaatgaaaggatgctcaacatcattagtcaccaaagaaatgttcctcaaagccatgagacaaaaaacaaatggcctgtggccccagctattcgggaggctgaggcaggagaatcacttgaacccgggaggcagaggttacagtgagccgagattgcgccatggcactccagcctgggtgacagagtgtgactccgtctcaaaaaaacaaaacaaaacacaacaaaacaaaatcatgagctaccacttcacattcactaggatggctataattaacaagtcatataataagagcgttgggcaattagaacccttatacactgctggtgggaatgtaaaatggtacagctgcttggaaaagtctggcagttcctcaaaaggtttcacagagcattaacacatgatccagcaattcactcctaggtacacactcaagagaaatgaaaacatgtctgtataaacacttgtatgcgaatgttcatagctgcactattcgtaataggtgaaaaatggaaacaatccaaatgcctaccaaatggcaaagggataaataaaatgtggtccattcattcgatgctcttattcagccatcaaaatgaagtactgatacatgctaaaacatcgatgaatcttgaagacattatgctaagcttaagaaaccagaccaaaaggccacacagtgaataaattccacttatatgatgtccacaataggcaaatgtacacagacagaaagcaaattagtgaatgcttagggttgggagagtttggggaaaatgaggagtgactgctaatgggtatgggatctctttctttccgttttgtgacagagtctccactctgtcactcaggctggagtacggtggcatgatctcagctccctagcagctgggattacaagcatgcaccaacataattttctctatttttagtagagacgtagagatggggttccactgtgttggccaggctagtctcatgctcctggcctcaagtgatccacccacctcggcttcccaaagtgctgggattacaggtgtgagccactgtgtcccgcctggtacaggatttctttcaggagtgaagaaaatggtataaacttgatgatggtgatggctgcacaactctgtgattatattaaaaactgttgaattggaaagtttacagaagtgaattgtatggtatgtgaattatatctcaataaagctataaaaaaataggtatcaaatagaaaaggctactttttacctctcatgctgacacacatgatggctgacacagtacatatgacaactgccaggagaatcatgaggacgatcaagtaactgctgagcaaggctccaccagcacagtccagctttcctctgtgcatgagatacaacgtcagaatgccaatccacctggcaaaaaaaaaaaagggaagggtcagaaatgaaatccaaggagctgctgtgtagaacatgatacaaagaaataaaaggggacagggcgcggtggctcacacctgtaatcacagcactttgggagggtgaggtgggcggatcacaaggtcaggagatcgagaccatcctgatcaacatggtgaaaccctgtctctacgaaaaatacaaaaaaaaaaaaaaaaatagctgggcgtagtggtgcgcacctgtagtcccagctactcgagaggctgagacaggagaattgcttgaacctgggacgtggaggtggcagtgagccgagatcgtgtcactgcactccagcctgggcaacgatatgagactccgtctcaaaaaaaaaaaaaaaaaaaaaaaaaaaaaaaaagaaataaaaggagttaatattttccaaaacaaggcaaggttcactttggaatataattttctttttgtagagacagggtcttgctatgttgcccagactggtcttgaactcctggcttcaagtgatcttcctgccttggcctcccaaagtgctgggattacaggcatgaatcactgcacctggcctggaatataattgccaacaataaaagatctaggcccggcacggcggctcacgtctgtaatcctagcactttgggaggccaaggcaggaggatcacttgagcacaagagttggacactagcctgggcaacacggtgagactccatctctacaaaaaatagaaaaagttagctgggcgtggtggcacgagtctgtggtcccagctacttggaagagtgaagtgggaagatcgcttgagcccaggaggttgaggctgcagtgagtggtgatcgcaccactgcactcccgcctgggtagcagagtgagaccctgtctcaaaaaaataaaaagaaaaggggtctcactatgttgcccaggttggtctcaaactcctgccctcaagcaatcctcccgtctcagcctctcaatgtgctgagataacaggcgtgagccatggcgcccagccaagaatctacttttgcataacaatgattcattccctgcacagatcctctgggaacagacttcaggtaccaatgccacttcccactgattccacactttgaaagacaacagcgttgtatgttgagcctgtctgcttctcacgaaatgcagccacaaccggctcggtattttttcctatccttcgtgttgcagattcaagtgccccgtacaaagggaaggaagggcacaagtggctgctcccgcctcaagaaaggagaactcgaggccaaggcttttgccggcggtaacaccctcgtggcaccccagggccaggtctcggcgctgcacacaaaggggtgctcgcgtcctgctgcgcggacttcgaaaccccctgtttgtcccccggggtcagcccacacactctgggggcttcggtttgtcatccgtcaaatggacacagcaccactgcccacctcttcgggcagtggtgagaactcgataagaggatgcgtggccagcgctgggaccgcgacagtgcttgggaagccacttctgtcaccgtctcaagggacagctcgccccccgctccctctccggtgggctccaccgcccccgtagccgccgtccttaccacagcactcgcacgaccagctcgaagaaccctgggaagaccaagtcgtcgctggcgatggcccagcgccggccgaagagtaccatccccggcatggcgaaggtcccgtagctcgcactcaggagagaccccgcgcgccgttcaccgagaacaaaccagcaccctccggacgccgccaccaaattatcggcgctcaagcgcaaacgcagcgagggcggggacctgcgcatgctcacgctgaggccgagatcggcgcaagcgcactgagccctacaccgcctcttccgccggagctgtctgcgcctgcgcagaaacgctgatccggaaggcgctggctgagtcgattgcaggtctgccggtcggtgaaatccgttctggtattttctttttctttttcgtgaagagtgcagtgatatccgttctggtgatatttccttttccttttttttttttttttttttttttttttttttttttttttggtgacggagtctcgctctgttcccaggctggagtgcagtgggtgtgatctcggctcactgcatcctccgcctcccgggctcaagcgattcacctgtctcaggctccggtgtagctgtgattacaggagcgcgccaccacggctaatttttgtatttttagtagagacgaagtttcaccatgttggccaggctggtctcgaacccctgacctcaagtgatccgcccgcctgggcctctcaaagtgctaggattacaggcgtgaaccactgcgcccggccctgtttgtctgtttgtttaaggcagcgtatggctctgtcgttcagggtggagtgcagtggcgcaatcatgactcactgcagccttgaactcctgaatgccgccttgaattcctggattccagcgactctcccacctcaacctcctgagtagctgagaccaaaggcacgtgccacactcccggctaatttatttttatttatttatttatttatttatttatttatttagagacatagttttgctcttgttgccccaggctggagtgcaatggcgcgatcttggttcaccacaacctccatctcctgggttcaagcgattctcctgcctcagcctcctgagtagctgggattacaggcatgtgtcaccatgcccagctaattttgtatttttagtagagatggggtttctccataaattttcctattttttgtagagaccggagtctcactctgttgcccaggccggtcttgaactcctggcctcaaaccatcctcccgccgcagcctcccaaagtgctggtattacaggcgtgagccactacacctgaccgaaattttcattttataaggagggacgcttcaggcctggaggaattagctagcctagagacccaggctgtcaatggcaggtgtgggactcatatcccgttctgtgagacttgcaagcatgggacaacattgcttccatctgtgccccttgctgtaaggagcccgtgttaggaacccctcgagttcagggtctgaaaccaccctgcagctggcggggtggagtctgagcgcttttcagtacccccactgccccaccctggtctgagccaccttcatctcctgcctgggctcatcaccccactgtgctttctcattctgctgtgccctcttcagcagccagggtgactttgtgaaccttcagataaagcctgcaccctgcctgggactttgcaaggctgcactttgtgcataaaattacattgcaggccaggcgcggtgcctcacgcctgtaatcccaacactttgggaggctaaggtgggcgaatcacgaggtcaggaggagatcgagaccatcttagccaacatggtgaaacctcgtctctactaaaatttaaaaaaaaagttagccaagtgtggtggcacgcacctgtagtcctggctacttgggaggctgaggcaggggaatcgcttgaacctgggaggcagaggttgcagtgagccaagatcgcgccctgcactctagcctggcaacagagcaagactccgtctcaaaaaaaaaaaaaaaattacactccagcccctggcaaaggcctttccctggtagtcacacatcaaaagtttgtaagggctcatttatctgtctccctggttactatttgcctctatcacccaccccactgcctgccgccttttccccctctgaaaagacatcagggtcatttttgctccaggggttctacattctgtgtttcctctgccaggaatagcccccctgcaggttttctgttactggatggaaagtcttggctgtgagttggtcaggggcttgcgtgttgaaccgagaattgcaacacaaggccgggcacggtgactcacgcctgtaatctcagcactttggggaggccgaggcgggtggatcacctgaggtcaggggttcaagaccagcctggccaacacggcgaaaccctgtctctactgaaaatacaaaaactaggccaggcacggtggctcatgcctgtaatcccaacactttgggaggctgaggcaggaggatcacctgaagtcaggagttcaagaccagcctggccaacatggcgaaaccccgtctctcctaaaaattagctggatgtggtggcacatgcctgtaattccagctactccggaggctgaggcaggggaatcgcttgaacctgggaggcggaggttgcagtgagccaagatcgcgccctgcactctagcctggcaacagagcaagactccgtctcaaaaaaaaaaaaaaaattacactccagcccctggcaaaggcctttccctggtagtcacacatcaaaagtttgtaagggctcatttatctgtctccctggttactatttgcctctatcacccaccccactgcctgccgccttttccccctctgaaaagacatcagggtcatttttgctccaggggttctacattctgtgtttcctctgccaggaagagtcctcctgcaggttttctgttactggatggaaagtcttggctgtgagttggtcaggggcttgcgcgttgaaccgagaattgcaacacaaggccgggcacggtgactcacccctataatctcagcactttggggaggccgaggcgggtggatcacctgaggtcaggggttcaagaccagcctggccaacatggcgaaaccctgtctctactgaaaatacaaaaactaggccaggcacggtggctcatgcctgtaatcccaacactttgggaggctgaggcaggaggatcacttgaagtcaggagttcaagaccagcctggccaacatggcgaaaccccgtctctcctaaaaattagctggatgtggtggcacatgcctgtaatcccagctactcgggaggctgaggcaggagaattgcttgaacccgggagatggaggttgcagtgacccaaaatcacaccactgcactccagcctgggcaacaagagcaaaactccatctcaaaaataataaataaataaaaattgcaacaaaaaccccacaaagcaacaacgacaacaacaaaaaacaaatcaacaaaagacaaacaaatggcgtaaaaagcacagattgattgacacgaagttcaagagaccacacagctcaagagacccctcaattagggtcttcattaagcagaaagaatgtggttaacactcatggctgaagtggaaacttctgtcttgttatcacagaagtgcagatgtggcctctatgctgccttatcttgcccagaactggctgcacctgctgatcttttgcttatgccttaacccttgttaaccattgattaccctcattcctgattctcctgcctcatttcctttttttttttttttgagatggagtcttgttctgtggcctaggtgggaatgccatggcgcgatctgagttctgcaacctcagccttctgagttcaagcgattctcctgcctcagcattctgagtagctgggattataggcatatgccaccatgcacagctaatttttgtatttttagtagagacagggttttgccatgttggccttggctggtctcgaactcctgacctcaagtgatccgcccacctcagcttcccaaagtactgggattacaggcgtgagccaccgcacccagcctctcctgcctctttttttgtttttgttttttttgttttttttgagacggagtctcgctctgtcgccaggctggagtgtagggcgcgatctcggctcactgcaacccccgcctcctgggttcaagcgattcttctgcctcagcctccctagtagctgggactacaggcatgggccaccacgcccggctaatttttgtatttttagcagagacggatttcaccatgttggccaagacggtttcgatctcttgacctcgtgatccacctgcctcgggctcccaaagtgctgggattacaggcataaaccaccgtggccggcccgatttttgtatttttagtagagacagggtttcgccatgttgcccaggctggtcttgaaccccagacctcaagtgatccgcccacctcggcctcccaaggtgctgggattacaggtgtgagccatggtgccccgctcctgcctcatttctatctctcacttcattcaggcctcagctcaagtgtcactgcatcaaagaggccttccctgaccaccttagctaaaacagcaaaactgtcaggctctgttccttacgctgctttagtttccttcatggcacataatgagcccctgacattacatcatgtttattatctcttacctcctcccttaaaagtgtaagtttcacgagcagaggcaccttgtccatcttattcactcctatgaatgtaatagagcacattctaggcattcttaaattctcaatgaatgaataactgattatgtgtagagtaagtggggccaggcacggtggctgacgcctgtaattccagcacttttgggaggccgaggcaggcggatcacttgaggtcaggagttcgagaacagcctggccaacatggtgaaactctatctctactgaaaatacaaaaattaggtgggcgtggtggcacgtgcctgtaatcccagctgctcaggaggctggggcaggagaatcacttgaacctgggaggcagaggttgcagtgagctgagatcacgccactgcactccagcctgggcgacagagtaagactttgtctcaaaaaaaaaaaaaaaaaagagtaagtagaaggaatgagaggcaggggtggggctggagcggtatggcagggcttgggaaggagaagatggaagtcagagaacagtaccaggaaattaatgttaacattgcaacatcagccaggtggcaagctggcttgaggctgagaccagcctgggcaacatagcgagaccctgtctcttaaaagaaaaagtaaaaacattgcaagatctgtaccaaaagtttcagaataaatgaaactaataataataaaattaaaatacaagcttgcaaggtctgtgaacaaatacatttttagacaagggtatttcactgggctgatgaaaattctgggcattgaccaggtgcggtggctcacacctgtaatcccagcactctgggaggtggacagatcacttgaggtcaggtgttcgaaaccagcctagccaacatggtgaaaccctatctctactaaaatacaaaaattagccgggcatggtggcacaggcacctgtagtcccagctactcggggggctgaggcaggagaatcacttgagcctgggagtcagaggttgcagtgagctgagatcgtgccactgcactccagcctgggcgacagtgcaagactgtctccaaaaaaaaaaaaaaaaaaagcatctgtgacaggctatctggaaatctggaattatagtaaagagtattatatgtcatcattattatttgtgtaataaattatctgctacacatctatgcagcacagtgttatcacaacaggtctggggtatgcacattctaaagaaaggattggctcttgaccagctcctaaaacataacttctgagcccttggaatattctacttgataggagtgtatttgtatatctcaggccttgggcaacatctagtagtttatgctaacagtgggttggtggtggcagccttgcgccatgctgtattaggttaacctctgggtgggtggctggagactgagtaggtaaggtgagtcacacggatgctccatgcctacatgaccgagcctaataaaatcccttggacacccaggctcagggaagcttccctagttggacatactttatgcatgttgtcacacattgttgctgggcaaattaaggatatatatatgactccactgtgaaaggaagcttatgcctggcgtctcccagacactgccctatgcaccttttcctttgctgatttgaatccatatccattcactgtaataagctacaaccataagtatgacagcctttctgagcctgagtgcttctagcaaatcatagaacatggccgggctcagtagctcacttctgtgatcccagcattttgggaggccgaggcaggtagatcacttgaagtcgggagtttgagaccagcctgagcaacatggtgatactaaaaatataaaaattagccaggcgtgctgccatgcacctgtaatcccaggtacttgggaggctgaggcaggaaaatcccttgaacccaggaggtagaggttgcagtgagccgagattgcagttgcactccagcctgggtgacagagagagactctgtctcaaaaaaaaaaaaaaaaaaaaaatcactcaacttgaaggtggtttgggggatctccaacacaacattctttgaatcagtaaaatgtacaataaatgtatgtgtatgggccgggcacggtggctcacgcctgtaatcccagcaatttgggaggccgaggcggatagggcacaaggtcaaaagatccagaccatcccggccaacatggtgaaaccccgtctctactaaaaatacaaaaattagctgggcgtggtggtgcgcacccgtagtcccagctactcaggaggctgaggcagggaggtcgctgaccctgggaggcagaggttgcagtgagccgagatcgcgccctgcactccagcctggcgacagactgagactccaactcaaaaaaaaaaaaaaagtatgtatatatgtgcatatattagtttttttgatgggttagttactaaataccaccacagcacgcactactatatactctaaaagcgtggctgttgctggtgagttttaagcctttagttataaaagtgggccaggctgagcatggtgactcacacctgtaatcccagcattttgggaggctgaggcgggaggatcacttgagcccgggagttggagaccagcctgggtaacatagtgagacctccgtctctacaagaaatttaagaattggccaggtgtcttggcatgggcctgtagtcctaagtactcagaaggctgtggtgggaggattgcttgagcccaggagttaaaggagttaaagactgcagtgagctatgatggcaccactgccccctagcctgggcaacagagagagaccctccctccaaaaaaaaaaaaaaaaaaaaaaaagaaggaaagaaagaaaaaaagtgataatctgcttctgctacgtgcaggctttggatgtgcttcaaattgacaaaccataaaaaatatgtttttggttttttttttttttttttgctggacaccattgatcagagataaaaagatgtttttgagacaggaaaatttgaacatagactgttagatgatatttaagaattactagccagggacggtggctcacgcctgtaatcccagcactttgggaggccgaggcgggcagatcacgaggtcaggagatcaagacaaccctggctagcacggtgaaaccccatctctactaaaaaaaatagaaaaaattagccgggcttgctgggggggcgcctgtagtcccagctactcgggaggctgatgcagaagaatggcgtgaacccgggaggcggagcttgcagtgagccgagatgtgccactgcactccagcctgggcgacagagcgagactgcatctcaaaaaaaaagaagtactaactttgttggtgtgataaaaagtctttatcaactaggactagaatgtagtatctatggatgaaatatgccatctaggagtttctttaaagtacccaagactgggccaggtgcagtggctcacgcctgtaatcacagtactttgggaggctgaggcaggcggatcatttgaggtcaggagttcgagaccagcctggccaacatgaggaaaccccatctctactaaaaatacaaaaaacttagccaggcatggttttgggcacctgtaatcccagctacttggaaggctgaggcacgagaatcacttgaacctgggaggcggaggttgcagtgagccgagatcccaccactgcccttcagcctgggcgacagagcaagactccgtctgaaaaaaataaataaaataaataaactatttaaaacttaagggtgaggtaaaacaagttctctaattttatgtatgcatgaaaacaaagtttattttcaaatgatgcttgttcaactttgcctaatctctccgtaattacatacacacaaacatatcgtgatacgtatgtgtggcatgcaaatatataaccaaaacgctgagccaccattaattcagtagtaggttgtgcctatgatcgtgtgtatatatatatatatatatatatatatatatatatatatacacacacatatatttatttatatatttacatttatttatttatttatttttgggggggcggggaggacggagtctcgttctgttgcccaggctggaatgcagtggtggatctcggctcactgcaacctctgcctcctgggttcaagtgattctcttgcctcagcctcccgagtaggtgggactacaggcgtgtgtcaccatacccggcttattttttgtatttttagtagagacaggttttcactatgttggccaggctggtctcgaactccagaccttgtaatctgcccgccttggcctcccaaagtgctgggattacaggcgtgagccattgctcctggcctcgacttttttttttctttttctttttttagacagggtcttactttgtcatccacactggaacacagtggcccactctcagctcactgtagcctcgacttcccaaggttcaagtgatcctcctgcttcagtctcctaagtagctgggactataggtgcacagcacaacacctgactaatttttgtattttttgtagagacgggttttgccacgttgcccaggctggtcaaattcctgagttcaagcgatccacccacctcgtcctcccaaaccaaagtgctaggattacaggcatgagctaccatgcctgccaaatccttttttttttttttttttttttgagacagagtctcactctgtcacccaggctggagtgcagtggtgcgatcgcagctcactgcaacttctgccttccgggttcaaacgattctccgacctcagcctcccgagtagctgggattacaggcacgcaccaccatacccagctaatttttttttttttgtatttttagtagagatggggtttcaccatgttggacagactggtctcaaactcctgatctctggtgatccgtccgcttcggcctcgcaaagtgctgggattacaggcatgagccaccatgccccacctcatgcctgccaaattcttaaaagtaatagttcttttaaaaacaggatttgtacttagcaataagataatgtttctacataaacttttgttagtataagtaaaggtattgtgaacttaatgttacaaacaataacaaaaccctacaaaacaatttaatttcaaagaaatctcttttgggaaactggtagtatacaaattttattttattttattttatttttgagacagtgtttcattctgttctgcaggctggagtacagtggtgtgatcttggctcgctgcaacctccacctcccaggctcaagcgatcctcccacctcagccacctgagtagctcagactataggcacgtgccaccacatctggctaatttttttgcatttttagtagagactgggttttgccatgtggcccaggctagtcttgaactcctggcctcaagcctcccaacgtgctaggattacaggcatgagccacaattttttgcttctttttctttttctttttttttttcagacagagtctccctctgtagcccaggctggagtgcagtggtgcaatctccacttactgcaacctccatctcctgggttcaagcgattctcatgcctcagcctcctgagtagctgggattacagacgtatgccaccatgcctggctaatttttgtatttttagtagagacggggtttcaccatgtccagtttcaggctggtctggaactcctggcctcaagtgatccacccacttcagcctctcaaagtgtagggattaaaggtgtgacccactgcgcccagcccacaaatttttttaagaagtaaaatttcggctgggcccgatggctcacacctgtaatcccagcactttgagaggccgaggcaggcggatcatgaggtcaggagatcgagaccatcctggctaaaacggtgaaaccccgtctctactaaaaatacaaaaaaattagctgggcgtagtggcgggcgcctgtagtcccagctacttgggaggctgaggcaggagaatggcgtgaacccgggaggcggagcttgcagtgagccgagatcccgccactgcactccagcctgggcgacagagcgagactccgtctcaaaaaaaaaaaaaaaaaaaaaaaaaaaaaaaaaaaaaaaaaaattagcctcgcgtggtggtatgcgcctgtagtcccagctactcaggaggctgaggcaggagaatcacttgaacccgggaggcggaggttgcaatgagccaagatcccaccactgcactccagcctgggccacagagtgagactctgtcttaaaaaaaaaaaaaaaaatctttaagaaactcttatttcccagatgaactatcgagatcaaagcacagctcttacaaaagtgactcacaatgacttttttgaaatgatggaaatatttcagatacatagaagatgcctgacacctaagggcccactgtgtagatttaacacagaataacatcctgccatatttatcccatcatgaattttggggaaaaataaaatacccttaatattcttctttgcttgttctttcagtcagtttcataatttgcaaattacagagtattcttcatagcctttcttggcagtttttttgtttttttttttgtttttgagactgagtcttgactccagcccaggctggagtgcagtggcatgatctcggctcactgcaacctctgcctcctgagttccagggattcctctgcctcagcctcccaaatacctgggattacaggtgtgcaccaccacgcctagctaatttttgtatttttagtacagacgaggtttcaccatgttggccaggctagtcttgaactcctgaccccaagtgatccgcccacctcagcctcccaaagtgttgggattacaggcgtcagccaccacgccaggtgactctcaccttttaagtgcccaagatgaaactaggcagagcattttattttagtattataaaaaagtacccttgtcattgcttaaaaggatatgtactatgttacgctgcaaatggcttttaaagtgcagggacaaaaggaattgtttcaaaactggagaaacacccacagcacttccagcagattccaggctacagattccagttaacccagatagttgtgaggatggctgggtggtacgaggacagaggcacacagaaaacacccacgcagatccaatcaagctagcctcagatgggtggctgcttttggaaggtaccaaggagtcaatttctttcttttttttttttttttttttgagacggagtcttgctctgccgcccaggctggagtgcagtggcgcgatcttggctcattgcaagctgcgcctcccaggttcatgccattctcctgcctcagcctccctagtatctgggactacaggagtccgccaccacgcccggctaatttttttgtatttttagtagagacggggtttcaccgtgttagccacgttggtctcgatgtcctgacctcctgatccacccgcctccgcctcccaaagtgctgggattataggtgtgagccaccatgcctggctctttcttttttttgagatggagtctcactctgtttcccaggctggggtgcagtggcatgatctcagcagctccaacctctgcctcccaggttcaagcgatgcctgtgcctcaggctcccaagtagctgaaattacaggtgtgtgccaccacacccggcttatttttttatttttagtggaagtgggggctttaccatgttggccagaatggtctgaaactcctgacctcaagagatccgcccgcctcagcctcccaaagtgctgggattacaggtgtgagccgctgcgcctaaggagggttgtgaaccttctggcaaaactgacccatatcaaacgagtcagagggactcctgccagaaccagtttccaaccagcttttcaaacagatgtcacaaagtaagcagaaagttaggagggcaaatatgattactgtatatgtaccaagctccagccacgagctttgccaacagcagctcatttaaaccacacagaaatccctggcagtttacctatgtaactggaggcaacgaggctcacgtgaagtccagggccagggagtacaagtgagggaaccaagcctcaacacatgcctgggcccaaagcatgtgcttttcttacttaagggttcccataaatcactatgatctccattaaaaccacttctccacctgctcttctcttagccagggcataaggcaacagggaaacttcttcaaagtttctttgtgattgaactggacaggggaatagattggtctctctctgttaaggagccaatggatagaagcctttattatttttaagttttcatttttactagttttttaaatgagatgtggtcttgctaggttgcccaggctggtctgaaactcctggccttaagtgatcctcctgccttagcctcccaaagtactgtgattataggcatgagccaccaggcctggctggaaagcagcttttcctatatccattactgggcaaatatctgaactttgctttatttctcatgatgcttacattgaaaaacacacaaacacctcaataaaaatattaattacctggtaacctttattcgggaagtgaaagtaactgtgaaacagtgcttcataaggcgtggcatacaaggccttggtttccaacgccggcgaggatgaggcccagtcccacactccctcgcaggcacccttgctaagatgtcctcctgggtgaccaaaacggtggtaacatagccaaggttacttttacttgggtaggatgactgcagaaggaatggctacacagagcttccagacctttccatgcgttgtgctctccagaggatgcgccaggtgtatcagatttgcatgcacaaagacaggtgtgcgccccacccaccctgggctgggcagcaagaggtctgctcacctactgcaccagacttcctagcctccttccacactccgaatcttcaagcaggatgaaaagagaccacagaaactgaagcaagactaggatgctgcaaagaaagatgctctgatacacaaaagccaaaacataagacaaggagggaagagtaaaatgagggagacagacaggaagttaaactatgcagttacactgccgatttagaaagatgttaagacacacactagatacaaatgaaacccatcctgctcccttcctccagaagacgttgtaatgcagaaagccaaaatactacatccttcttgtagtcagcactgttagtattcaacactttaatatttatggtgtatcacataaaaaacaaagtcatatacttttgcattaatcaaaaaatagcaaatccatataatggcaaaatcaggaaaaaaattctagtatttccacaaaatacataatgtcttacagatgattatgtgaactttaaatgtctgcagccctacagagcttttgttgccaattgaaaaacaaaaaaatcccaacacaggatgttcaaaaagcctaattcataaaaagacaatttattccatgtttaatatagtgttttttaggatggtaacataagtcatgcaacagctctgtaaaacaaaacaaaacaagaaactacgatgtcggctgcgggttaaataaaaagaaaaccacacatacaaaaaagaatgtaaggaatggttagtggtgctgccaattaaaaaaaaaactgtaattaaatcatcttaccacccaaaagtgatatggaaaactgtttgaatctgagcatggacatggttgtagtcatcttttggaattataagtgaaagtgataggtaactccttgtgttccatttctcagagtagattgctatatccaaatgatcatgaacacccctcccatcccacactcagatggaaagcagccagaacccctgccactggattcttcagcacccttgggacagtctccaactgacacttcccagcaggggaggagggcaggcacctttggtgactcttcagtgagactccatcgacattcagaatcttaaaatgttggtaatgaaaaccatggacctccaagtcatccttaccaaccttaaatgtagtgttgtgacatccaacgaaggacttccacgtcacgtgggaataaatttgaacagatacatccaattgaacatagtgtctcagatttcaaacaaatacagctcatcttttgccaaaaaataaatatagtggaatgcaagtttgagggatggaagaatatataatctatcaactgtcaaggagtacaatttcattgcagacacaaagacttaagagtttcaaagaattttttaaaataaaaaaaaaatttgcacttattcctcacaaaatcttcacttttggaactatcccaattgaagctacacactgaatttattaatacagcattaagtttctttgtgtaaaaaaatctttgtacacagtaataaaaaaagataaggcaagatgcattaaacagaaaccttctggctcttttcctctgcgtttttacagagccactgatgactatctgcaacaaaagagttaagtttctgattttccgtatcaagcatcttatgcctttgctgtggtaagaattctgtccgagcaccctgaaggacagatgctggtgatggtctttggcacttatgctggcaaactgagcttctttcccttgagtactagaatttcaaagagaagaaaagaaaacaaaaggttactgatattgacaaacttagcttccttcttcccattcctagaagtctcccacacacaagattctacatagtaaggtataggaaataagcaattgtattttaaaaatacaaatttgattgaaagtgccactaaattcatagtggctttttgttattatgactttcaccctaatcaatatatagtaaaatatagcttatgtagggaggcctatgaaattctgggtactataacataaaggccggatgcagtggctcatgcctgtaatcccagtactttggcaggccagggtgggaggatcccttgaagctaggagttcaagaccagcctgggcaaaaaaagtgagagcgaccccatctctataaaaaaaaaattttaaaaagaaccaggtgtggtggcatgcacctgtagtcccagctactcaggaggatgagcagggaggatcacttgagcccaggagtttgggactgcagtgaggaaggatcacaccactgcattcttgcagcctgagtaacagagtgagaccctgtctctttaaaaagataaaaaaaaaaaaaaacacaaaggatggcagggtgaggtagctcacgcctatacttccggcactgtgggaggcagaggtgggcggatctcctgaggtcaggagttcaagaccagcctagccaacatggtgaaacaccatctctaataaaaatacaaaaattaggctgggcacagtggctcatgcttgtaatcccagcacttggggaggctgaggcaggaggatcacctgaggtcgggagttcgagaccagcctgaccaacatagagaaactccatctctactaaaaatacaaaaattagctgggcgtggtggtgcatgcctgtaatcccagctactcaggaggctgaggcaggagaatcgcttgaacacaggaggtggaggttgcggtgagccaagattgtaccattgcactccagcctgggcaacaagagcaaaactctgtctcaaaaaaaaaaaaaaaaaaaaaaaaaaaaaaaaaaaaaaaaaagctaggcgtggtggctcacgcctgtaatcccaatactttgggaggctgaggtgtgcggatcacgaggttgggagttcaagaccagcctggccaacaaggtgaaaccccgtctctattaaaaatacaaaaattagccgggcgtggtggtgcgcacctgtaatcccagttactagggtggtcaaggcacgagaatcacttgaagctgcaaggtggaggttgcagtgagccgagattgcgccactgcactccagcctgtgtgacagagcaagactcagtctcaaaacaaaacaaaacaaaacaaaattagccaggcatggtagtgcgcgactgtaatctcagctactcgggaggctgagacagcagactcgcttgaacttgggaggcagaggttgcagtgagctgagagcaagccactgcattctagcctgggtgagagagactcggtctcaaaaaaaacaaaaggaaagagataagacatatatgctcttttttttcttttttttttttttttttgagacagagttttgctcttgttccctaggctggagtgcaatggcgtgatatcagctcactgcaacctctgcctcccgggttcaagagattttcctgcctcagccccccaagtagctgggattacaggccatgtgccaccacacccggctaattttgtatttttagtagagatggggtttcgccatgttggtcaggctagtcttgaactcctgacctcagacgatccacccatctcggcctcccaaagtgctgagattataggcgtgagccatcgcacccgacctatatatgctttttacctagcaattccaccattaggaattttattgtatagctggatttttagcctgggatctgtggttgggtttcaggggctcctgaacccctcaaaactatatacatgcatttgggtgcatttgcgtaaatatcttttttttttttttttttgagagagagagtctcgcactgtcacccaggctggagtgcagtggcgcgatctgggctcactgcaagctccgcctcccaggttcacaccattctcctgcctcagcctcccgagtaactgggactacaggcgcccaccaccacgcctggctaagttttttgtatttttagtagagacggggtttcacgtgttagccaggatggtctcgatctcctgacctcatgatccgcccgcctcggcctcccaaagtgctcgattacaggcgtgagccactgcacctggcataaatgtttttttttttctgaacaaggatgatagctttcatcaaatatttgtaaagttcacacgtcctatgttcatacaaatgcaaaaacacatatacacaaggatgctgatttaatgactggattttaacagcaaaccagtaacggcctgaccacccatgaatgggggctgggtaaataaattatggtacatgcacataatgaaacactctgtggctactgaaaattatgtagatttctagtgacatgaaaaatgtgaggggataaaagcagtgtatagaacagcaatgtacagtttaagtcatgtgtctgtgtatgcatagagaggtatctggtgttaatgttcactgaaacaccagatgaatcttttacagtgaaaatgtgtcactttaggaaaagctattgcaaaagaaaaagggttcttatatttaaaaagacaacatcctgatccagaatgttattggccaatcatgaaagtgtttctctggagccagtttatgagagagtgccagattagaagagtgctgggcaagggcactcctaaaagaacacgtcactctagaaacaacgcaggtcgcacccaacataccttttgtaatgtacaagtagaagaagtcacagtataggatggtctggactacgccggccaccacagcaatgaggtcaaagaagccctcaaagtagaagcgccagatccagttgacaagatacaaagcacgatagaggcccaggaagaacaggtagtgggtggtgatggtctcggcctccccagtcttgctgatcataaatagctgcggaaggatagccacggactccaggtagatggagaaggtccagaggatctggaagagaaatggcaagcttccatcacgacccactgcccaccaggagctcagaggaaacactcttgctttctttaccacaaagcagcctaagatgagtggggagtggggcatgtcggcccaaaatagaacaacagcttggcaactgcataacccagtggtcccagcctttttgacaccagtgatcggtttcatagaagacaatttttccacagaccagcagggtggatggatggtttcgggatgattcaagcacattgcaatcattgtgcactttacttctgttattactataatatacaatgaaataattatacaactcgtcataatgcagaatcagtaggagccctgagcttgttttcctgcaactagatggtcctatctgggggtgatgggagacagtgacagatcatcaggcattagattttcataaggagcatgcaacctagatccctcagatgcacagttcacaatagggctcatgctcctatgagaattgaatgctgccagttatctgacaggaggtggagcttgggcagtaatgtgagtgatggggagcagctataaatacaatgaagcttcacttgctcacccacggctcatctcctcctgggtggcctggttcctaacaggctatgaaccagtaccagtcagtggcccaggggttgaggactcctggcataaatcacagaaacttaagcaacctttaagaggcaaggcactgccagtgtgacaagctgggtaacctggacacctctacctctttgaattttcatcaccttgtctctccaggtttattcttccctcttcaattttctatgaatctacatacagaggtttctcctggacaagcttgtcctgctccagatctgggataccaaatcaaccctgctttccgccaggattgacaatactgataattgataagctccttccacttcctcactgctgtttttcctcactgactgatcttgccaaactactgaaatattttcactatttttcttattccttaagctttctggtgtggttaaatcaaaggggtagaagtcacaactgtaattatggaaattctctgcccagcgtatgactttattcacgatgatgatagaaggactttcagagggtccttgagtattttaaaagtccaggcatggctgggtgtggtggctcatgcctgtaatcccagcactttgggaagccgagacaggcagatcacctgagatcaggaattcaagaccagcctggaaaacatggtgaaacccggtctctactaaaaatacaaaaattagccaggcatgatggtgggtgcctgtaatcccacctactcgggaggctgaggcaggagaatcgcttgaacccaggaggcggaggttgcagtgagccgagatcatgccactgcactccagcctgggtgacagcgagactctgtctcaaaaaaaaagaaaagtccaggcactcccagcacccatcagacacccagggtagcacagtgacttgatcggccccaggatgtgaagcagcaccgtttgcctgttcagcagggaaagaagaggcactcaggagcagatcagctcactgcacagtactaggggcaccacaaaccagctttcctaaaggcaagaggtgcagagtgctgctaagcagggtcacagacacgacatcagtgcacatctgtacatgaaaagcaaacaaaatgtgggctacaggagggagaccttgttcttcccacactgggacaggcagggctctgtgtttggtaccactgaagtcaagataatgaaatacagtttcaagtttctatttcaaatgaatcagacagtaaactgtcagcagacacctaaatatgtgggtgcttaattctcatctacgatttttttacaccagtcatgaacattgcactagagtttgccaaaccagaaaataaaaacaaaaaactccatgaaaacctacacgatctgcaaacatgcaaataggtccattctagataaccagacatgaccatgaaattaactttttttctttagatggagtcttgctctgtcgctaaggctggagtgcagtggctcgatctcggctcactgcaacttccgcctccaggtttaagtggttctcctgcctcagcctcctgagtagctgggattacaggcgtgcgataccacacccagctaatttttgattttctttcttctttttttttgagacagcgtctcgctctgtcgccaaggctggagtgcagtagcgcgatcttggctcactgcaagctccgcctcccaggttcacgccattctcctgcctcagcctcccaagtaactgggactacaggcgcccgccaccacgcccagctagttttttgtatttttagtagagacggggtttcaccgtgttagctggatggtctcaatcccttgacttcgtgtcccacctgcctcagcctcccaaagtgctgggattacaggcgtgagccactgcgcatggccagtttttgtatttctaatagagacagggtttcaccatgttggccaggctgaatgcctgaacctctgacctcaagtgatctgcccacctcggcctcccaaaatgctgtgattacaggtgtggtgagccaccaggcccagacctaaataacctcttttttttttttgagagacggagtcttactctctcgcccaggctggagtgtagtggcacaatctcagctcactgcaagctccacctcccgggttcacgccattctcctgcctcagcctccccagtagctgggactacaggtgcccgccaccatgcccagctaattttttttattttttagtacagacggggtttcaccatgttagccagtatagtctcgatctcctgacctcgtgatgtgcccaccttggcctcccaaagtgctggaattacaggcgtgagccactacgcccagccataacctcttttttcttttccctcgagacagtcttgctctgtcacccaggctggagtacaatggcgtgatctcggctcactgcagcctccgcctcctgggttcaagtgattctcctgcctcagccttctgagtaactgagattacaggtgcgtgccaccacacccagctaattttttgtatttttagtagagacggtgttgcaccatgttggccaggctggtctcgaactcctgacctcatgatccacccaaagtggaggctgaactccgcctcggcctcccaaaatgctgggattacaggcatgagccaccatgcctggccctaagtaaccttttaaactaacctcaagaggagagaaatcgtgattaactaaaaatgagaggcctcccacagggaccaccagaaactccactcggaaggtatcatgatttccatcgtaggttgccttaaatttcaggtagatcaggtacactgtggcataggagcaggcaaggtagataacctacaaataaaagaaaaaacaccaggtgtcaataccttgccactgttccagcaccccccagcttttttaatcacccatgtatttggaaaggcaagatttttttccttagctttgtttttggaattttaaaacttaaatatagtaaaattctcttttttggaggtgttcagttctgaggcataaccaccaccaaaattaggacacagaatagttccatcatccccaaaattctgccatgctgccgcttcgcagtcaaactcccccaggcttccttcacctcctgcagtgcaatcacacttatgttctctgtccatagttttgccttttctagaaagccacataaatggagtcacatagtatgttgccttctgggtccaatttcagttagcctaatgcatctgagaggcaaccaaacttattgtgtgtatagcaggtctgccaataacatcctttggttgtaacactgatgagaaaagaaactggttcccggctggggccgccatccatggcgtttgcatgctctccccgagtccacgtgggtcttctccaagagatactcttggagaatctcccaccagagatactctggtttcctcttacatctcaacgatgccagttaggtgaactggcatgtgtgaactgtcctagtgtgagtgggtgtgggtgagcgcgccctgtgatggaatggcatcctatgcagttgggggaaagttcgcgccttgaacctgagctgctgggataggctctggccacctgggaccctgaaatgaagtaagtgggttggaaaatgaatacaaactatggtaaaataattcataaagtagtatacaataattatacatatgtaccacaataaacaatgtagtacaaaagcactcagtgagcctgctatatttgttattgtttgtttttgaactttatggtagtaggaggtactccttataatttttgtttgtaaacatatacttcttgatttaatccgccaccactatgaccaccatcatgcacggattcaccaaaaactggataaataattatgttgcttttattaatctttcttaaatgtatagctcatgttggctgggcatggtggctcacgcctgtaatcctagcactctgggaggccgaggcaggcggatcatgaggtcaggagatcgagaccatcctggctaacatggtgaaaccctatctctactaaaaaaaatacaaaaaattagccgggcgtggtggcgggtgcctatagttccagctactcaggaggctgaggcaggagaatggtgtgaacccaggaggcggagcttgcagtgtgccgagatctcgccactgcactccagcctgggtgacagactgactctgtctcaaaaaaaataaaaaataaataaataaataaataaataaatgtatagctcacatttgtttcggtttttttttttttttttttttttgagatggagtctcgctctgtcgcccaggctggagtgcagtggcacaatctcggctcactgcaacctccgcctcccaggttcaagcgattctcctgcctcaacctcccaagtagctgggattacaagcgcctgccaccatgcccagctaatttttatatttgtagtagagacggggtttccatgttggtcaggctggtctcgaactcttgacctcaggtgatctgcctgcctcggcttcccaaagtgctgggattacaggcgtgagccacagcacccggcctgttttgggtctttatttaaaagtctggtggtgttttggggaccggaaatatgctgtaggaacttaactcttactcatgtcaattagcctatggtaaaactggcttcagtgtatgttgtttcacttcaagttgcagtgtgtgttgtttcacttcaagaacctaccaatgacattaagtgagggcctagtgttaataatttgttcctttttatagctgcgtccattggtggtccattgtatggatgcaccagtttgtttattcactcaccagttgaaggacaggtggtttctaatttgggaggacagtggataaagctgctgtgaacatttgcgtacaagtgtttgtgtgaatgtaagttttcacttctcttgggtatgtacttaggggtgggactgctgggtcatatgttaagtgtaagtttaactttttttttttttttgaaacggagccttgctctgtcaccaggctggagtgcagtggagcaatctcggctcactgcaacctccgcttcccgggttcaagcaattctcctgcctcagcctccccagtagctgagattacaggcgcatgccgccacacccagctaatttttagtagagatggggtttcaccatgttggccaggatggtctcgatctcctcaccatgtatgtgaataaatacaaaacaaaatctacatgcataaacaagacacacatccatctacacatgcactgagccccctcagcgcatctagccaaggctcacagcagagaggcctctcaccaggacctagactgtggccagctcaacattaataaaaacttgatgggcgttatttccactaaggccttagcagcacctggagaagaacagctgcttctctcctctcaccagcacacagaagttaaagtaaaaagacacgagcacctcgggtctcacgccagactttcaggacatcgtgcttagaaactacaaccaagcaagcatggattcctctgaaacctgggcatcctgagggggagagaggattcttgctcacacacctctaatgcctgcagttttaacttgcctagacaagtggggacctaaccatttttaagtaagctcattatttcctgaatactaggttcccatcatttggtaatgaagaatccattataagtgactcaaatttgctttttagtaaagaccagactcacatactgctttgtctcctttcaacagtgcttatgaaaatgctcttgaacacaaaatgttggggggaggttgtttaggtgccataccaataggattcagttgaaatattacttccttgggtatgctaataaccaaatggcctagaatagtgcctggtgcacaggtgctcagtatttgtagaaagaaggaaagaaagaaagaaatcagactcctattacatatcctgagagcccctgttcttttttttttttttttttttcagacaggatcctgctctgtcacccaggctgccaggctggagggcagtggtgcaattacggctcactgcagcttcaacctccagggctcaagcgatcctaccaccttaccctcctgagtagttgggactacaggagtatgccaccatgcctggctaatttttgtattttttttttttttttttttttagagacaggggtctaactatgttgctcaggctggtctcggattccttggctcaagcaatccacccaccttggcctcccaaagtgctgggattacaggcgggagctactgggcctgtttcatgttttttatatccataggttcgcaactcttatacttttcctttgtggcacccatcataaatcgcagtcatttgtactgccatgatctgtgtactctcccacaccagcctagagacttctgcttattttctgccgcatcctcagttcccagctctgtaggtgttcacaagcatgaattcaacactgtgcgaaagaactgaagctcacgtagtccacaacttcccccagtgtggggtgtgtgccaccagtgctacacaaagtgttaggtggtgtgcaaacattttgtattttaatagttatacactagttttaatgtgaattagaaaaaatataagaaagacaacaaaggtgttatagatactaataattaggacaagttgaaaggtttaaaaaaatacgttactaagtaaatgatggtatagagatcatttaagcacggcaaatgtaataaaaatgacacacacacaacagtttaagtaaaactgactcagtggcaaagaaaaaagatagaagcctatagacagttcctcacacagcagcgaaatgagacactgcaactaggagtcctgctttcgttccttgttatgtaccaacttgctggatttctctggggactctgtaatttcccacggcttgaaaatataatagttaccgctcttacttacagagttatcaagagctttagatttatcatacttaaggaacctaaaataaaaaagttctaacttcaaagtattttaattaactactgttttgaaaccaaaaatgtatgcttactgatagctcgtttagtcccagttatatatacaaggtggtctgaaagttttaaagtcaagaacagcatattaagacattatttttggagcattttaattaaaaatacacagctgacataaattaagtgtccatagacctgtgcactgtagatgaaatacattcctgtggatggcataccataccttcatagatgtgttatacaatgaaataaatgaagtaaaaagatccaggtaacgagttgtgaagaccagtgcaaacagaagctggcttttcccagaaatacctagagaaacagaagggaagtattagaagggcctgaagagctttgggattcctgtggatcacactgtgcagggagtgcagacagggaaggaggggtgcgtggggtcaaggcccaggtctagggatggctctgaatgaacaagagcagttgtagtttttctatcccttcccattcccaaacatgctccttttgggaggctctaacaggcttttctgtctcactataaagggcgaccacaggaaaggggctttattatgccaggatgtgtatcattcaaacgaaccttttacttctcaaatatatcaccttaagtaggaacaaatttctcaataattctgctgtcatttagtgttataacttgtctcttacattcagatttttcttttttgttttcccctgagacagggtctccctctgctgcccaggctggagtgcagaggcacgatcaagctcactgtagccttgacctcctgggcttcagcaatcttcccacctcggcctccagagtaggtgggactagaggtgtgaactaccacacccagctaatttttaaacaaattttttgttcaccatgttgcccacactggtcttgaactcctgggcccagcttcccaaagcgttggcattacaggtatgagccatgtcgcctggtcccttctttgtatggtaaaacagtatctccatggtgagaaatcttttgagaacggagatggagtctactgtcattaagggggatgaggagtagatgagaagcaccgactcaggtaagagttgggcaggaactcccgctggaataatggcatcgcatcccatggtgacttctttgctaagagcggcaattacttggatatgttaagatttttaaagcttccctctcagttaggcatagtggtcatgcctataatctccacatataggggggctaaggcgggagaatcgcttgagcccaggagtttgagaccagactccatctctacgaaaaatagaaaagtgatagccaggcaaggtggcacacacctgtggtcccagctacatgggaggttgaggtgggaggattgcgtgactccaggaggctgaggctgagtgagctgtggtcacatccctgcactctagcctgggtgacagagcaagaccctgtctcaaaaaataaattaattacaataaaatagaaattccattgtatttgtataaaaatgttcctgaatgctaggacaacatgaaggtatgaacccacaactacagctggtcttcaaaagcagctgtcttttttaaagccttgaaactgtgtttccacttccaaccaccaacccacctccagagcactgcatggcacagccacactcagccaggaaggctggacatttatgtggtgtgcacacagcttttctgacatctatatttggccaaatatttatgtgacaaaggacgcaaactatgggtttcagatgctggagactgagcaaatgcattaaagaaactgaaggctgactaaatgtcagaacccacccaccctcatctataatgcatacttcacaccactacacattttagtaagtatgaatttaacagaaaagtcacttcacccaaatcattcacaacactcctctggaacgtgaaaagcacattatttttcttttctttttttgagactgggtctcactctgttgcccaggctggagtgcggtggcacaagtacagcccactgcacctttgacctccctgggctgaggtgatcctcccacctcagcctcctgagtagctgggactacaggtgggtgcaccaccacacctggctaatatttgtattacatgttgtttttcaatattttatgaacaatcattttgcagcttgctgaaactgaaaacctgaatgtaagaatgttactttctcagatgaataactgtagtctcagcctattcacatacacatctaaatagaaatggaaaaaaatgttgatgccacccttccagatccatcaatagaaaccaaagggccaaaggaggagacacggacagtgaatctgctcttagtcttttccccgtaacggataactgatttcttcctacagagaccaatgttccaaaggggaaatgacaaggctgctgctaaccaagaaaccgggaggtttcagagggggaagaagaaagaacagggagcagtcagaccatacctggtgtttgttgaagccttgagaaatcaatttccagcttatttcctatatggttctttccaatattttaaatataaacatacaggatacaagtaggtgaattttgtgggaaagggttttactctaacagaactttggaagccaggcagatttgaaattgtgtcctcattcccagcattcctatactgaaaaccagggaccatcatattgtctttaccagcccccgtggggacccagctcatatcccacctcctctgggatgtcatctctgaagataccctccctcaggactgttgattcattcagcaagcacataaggggaactgcttcatgccagctgctgccctagctccaattacagtacttataaaaatacactgtgatgatgtggttcctgcctctcctctccccaaaaacctcactcagtaccaagatctttaaaggctggggtcatgccttattccatcttgtattccctgcatgggacactgggccctgacacacagcaggactcagaaaatatttgctgaatgaataaatggacaaaagaaaatgggattcattttatcttcatgtcatggggtcaaattctcattttgtggtattttgggagaacacttctgaagaatgtccaggtcatactgtgtctctgtgactgtaaatagggctctgccctaattaactactagctagagggtgagagagccccaggtgcgcacagggcagtgtgtggtttgaagccggtccatggagtagcgtccacgcaggacagccttgctggaaatctgcggatgctaacgtggtcccacactgttcttccccagcctgagatcctgattaggaagtagcagcttcttcctttaaaacaacaaaactgtcctgtcttcataggaaaatgggaatcctagctgaagacagaagggggtggggcaagaatctcctggaggggttgggagtagaatacctgctattaaaccagagcagctcctagtcggcttctctccactttgagatcaaagcatgctaaggttaccaggtaataagatctcccagaatactcacttttgtaaatgtttctgaaactgatatccccttaccaaatacaccaaacatctatattaaggagtacaacttgttaaatggaaatcagtcattaaacaacatcattcttgtcttatcctactgggccaggttaaatgtcttttgttttctgttttgttttcgagatggggtctctctctgtagcccaggctggagtagactggtgcaatcatagcttccagccttgacctcctaggctcaagcaatcttcccaatgaggtattatatattacaaaatagttagaagttttcgaatgaagaaatgataaacacatgaggtgacggaaataactacccagattagactatacaacatacacatgtattgaaacatcaaactgtaccccataaatagatccaatcataatgtatcaattaaaaaattttaatccgtaaccccaaataatgcaaattaaaacacataaaccaaaaataagacatgaacattttaaaatttgatattgtcaaatttctcctagaaaggctatgccaatttacgtatctactaacacgaaatgcaaagaccctttcttcacatccttgccaacattttcctacccagtggtatgtactgctgttcttttttctttgcttgcccgccccccggttttttttttgagacagaacctcactcagttgcccaacccagggtataatggcatgatcacagctcgctgcagcctggggcttaagcgattctccctccttagccacctgagtagctaagacacaggtgcacgccaccacgcccagctaatttttcattttttttgtagagacagggtttcactatgttgcccaggctggtctcaagctcctggcctcaagtgatcctttagctttgacctcccaaagcgctgccaccacacctggccgcactgctattttcatattcaaattcctaactcctagcaagactaagcatcctttcatgcttcattggtctttcgttattcttcagtgaattgccaactttgcccatttttcagctgggtttttatttgtaggagtactttattatagatattaaccttttgtcacttaggtatattacagattatttcactcagtttattgtctttagctttgatactattctgaattaagaaatcaatttggagagatgtcatcttgcttcctcaccagccttcctgggtgctctccaggaccgtagtatgaacatacatgcaggtcatcttctatgtccatcagcaaagtttaatatttattttttatttttatttttttgagacaagagtttcattcttgtcgcccaggctggagtgcagtggtgcgatctcggctcactgcaacctctgcctcctgggttcaagcaattctcctgcctcagcctccctagtggctgggactacaggtgcctgccaccacgcccgggtaacttttttgtaattttagtagagatgggtttcaccatattggccaagctggtcttgaactcctgactcaggtgatccacctacctcggcctcccaaagtgctggaattacaggtgtaagccaccgtgctcggccatcttttgtacattttcctatcatttcaactacattgcagctttcttgagaatagaaacttttctctcttttgtttgtcttttgtttttgagacagtctcactctgtcacccaagctgaagtgcaatggtgtgatcacggctcgctgcaacctcgacttcctgggctccagtaatcctccccactcagccttctgagtagctgggaccacagcgcaccaccacggctggctaacttttgtatttttggtagagacagggtttcaccatgctgcccaagctggttttgaactcctgtgctcaagtgatccacccaccttggcctcctaaagtgctggaattacaggcatgagccactaagaccggccaagaacaaaaactttttttttgtttgtttgtttgattttttgagacggagtctccctctgtcacccaggttggagtgcagtgcacagtctcggctcgctgcaagctccacctctcgggttcatgccattctcctgcctcagcctcccaagtagctgggactacagccgcccgccaccatgcccggctaatttttttgtatttttaatagagatggggtttcaccgtgttagccaggatggtctggatctcctgccctcaagatccgcccgccttggcctcccaaagtcctaggattacaggcgtgagccaccacgcccagccaagaacaaaaacttttaatagctacaagctgctgctctgaattgtgtgccagtgccttgcacatagtgggtggtcaataaatgagagtaatgattactcagagactggcactcaaaagagcacaggccaaacagctacagagggagctgcatatgtgaagcaaaagcttcttggagtactccacatcttacccactatattactccaaaaatatcaactgtcccatatctgaaatgtatggacaccataagatccagtatggggtttggtaggatgaaaagtttacaacctacataacagctaacaacaatctaagcaacaggggaaggagggaaggagacagactagagggggaaggcccggggtcgtggatctcagaaagactcctctagctacagtagatacacactactgataactagctacagtaatacacactactaatagacacagcactacagtagatacagcactaataaccattggcctacaggaaaatttgaataggaagcccttcatctaaaaccaccgcttgttcttccgaggttatgtaggtcagtgtttaggacaaaaataaagtgacaacttgagcataccgtggatcgagctgcaatgataattcagaataggagaaactcacattccatgttgacacccttctgtaatgacaacagcagatacagccacaagagaatgcagcctcaaacatgatcaactcactgcccccactttaaaacggtccttaaaggcagctgttctggaatctgcctatgaggaacacagaatctccagcttccacacgagtcagcctcatccctgatccttatggggtaaaaagcaccatggttccgagactaaaacagcattttcaaaatcagtgctaaaatcctaaaaatgaaccttggtatgagtattttcaaaatgagaaacacaatctggatgcacgtttctcctattccagtcatttgagaaactcatatcaaattcttactctttcaaaagactctaaacaacttttataatttagtatggaaaaataaagcagcttgtcaaagttagcatttaattctgaataaatgatctgggtgatttacttaaaatcaggaaaacacacaaaccaggacagaaatcatcctaagtctgagaacaagaacaatttaataatgtcccgggaatacttggcaaacacacacacacgaagttaactcatctatttcacttccttcgttagcattttagctgaagtatttcatattttccttatatgctcctgaatctctcaaatgaaaacagtgaatagtaaaaaacaaacggccaggcgcagtggcttacgcctgtaatcccagcactttgtgaggccgaagcgggcggatcatgaggtcaggagaccgagaccagcctggccaacatggtgaaactctgtctctactaaaaatacaaaaattagccgagcgtggtggcaagcgcctgtagtcccagctaatcaggaggctgaggagaatcgcttgaacccgggaggcagaggttgcagtgagccgagatcacaccattgcgctccagcctgggacacaagatcaaaagttcatctcaaaaaaaaaaaaaaagaaagaaaaaaaaatcattattctgaagttgcactaaattctcccaaatatcttagtttggataaaagtttaggagacagcacacttcaaggcttaatgatttgccagaggaggggattctgaaaaacatatggaagaaaatgaagagactcacacaaagattttgaagcaaaactaaagattaaaagtaacatcgccgggcactgtggctcacacctgtacccagcaactcaggaggctgaggagggaggatcgcttgagcccaggagtttggggctgtagtgagccgtgacacagccattgcactccagcctgggggacagagtgagacatcggtcccactgttttaaacaaacaaacaaacaaacaaacaaaaaaactaacatcatctgagtgtaacaaaaaaggatctaaacatcgtggtttggtatcaaatgtttatttaggctcccttagacattcatctatccaatcctttgagttactaattgtgcttcaatcctggctctatcactaatttattccactccctaagactcagatcccacctccacagaatgggaacaatagcacctacctcctaaggtcgtttatttatttatttatttatttatttatttatttatttatttatttatttagagacggtttcgctctcgttgcccaggctggagtgcaatggcgcgatctcagctcaccgcaatctccgcctcccaggttcaagcaattctcctgcctcagcctaccgagtagctgggattacaggcatgcaccaccacgcccggctaattttgtatttttagtagagacggggtttctccatgttgaggctggtcttgaactcctgacctcaggtgatccacctgcctcggcctcccaaagtgctgtgattacaggcatgagccatcgcggccggccctcctaaggttattttaatgactacctgggataagccatataaagcactcggctgactacttgatatacagcaagtgcctaaacatcacttacccaaactgcagcagttatttgctgtcactggaaatcatacagttgaacctctcagaactatgtatcaactgagagataacctccaagtcaaacacactggcacatggactttgtaacacccatcttaactgttcaaaggtctttttggttttgcttacttcccggatctcagttatgttccaaggagacaggcgaggcctgcagacagcagattcagagatgtaagtgtgactttagacgccaaaatttttagaaataaatcaggtaaatagagtctctgcacccagataattcaggatcatcttttactgcctctgaaaaaattaagttcttgagttcaacaaaaattattttgccgagcatcaaaaataagtttaagggatttttaagaaagttaaagcctgggcaacatggtgaaaccttgtgtctacaaaaaatagcaaaaaaaaaaaaaaaaaaaaaagttagccaggcatggtggtgcacgcatggagtcccagctattcaggagtctgaggcaggaggattacctgagccaggggaggtagaggctgcagtgagcagtgatcacacactgcactcaagcctgggtgacagagcgagaccctgcctccaaaaaaaaaaaaataagttaaaaactctcaattattatacctttaaaattaacgaaatgtaaaagtccaaaactattatctgggaaagactcgtttcactgccgcctagcagtgcctgcatgaaatctgtactcttgatcagggaaccagccagctcactggtgacgtggagcaacgaattgcaggagcccataggaggcctcggcggtccccgggcgccgcagttttaagagaacccattattagatggaggcacttaaaaaccagatcgtttcccaaagcagcattaattacgccaagaaaatcactgacgacctctcggcaagcccctccccagcggtgtgatcctggacccaagggcttgggtgatgcccacacaacacttaaggacaggtctgacccgaccccactacaccacacctagagcccggtcttgcacgggcagggtggggagccgagtgacctctcccggcgcccgccccacctcccgagctggctgggctgccacgtcaggcgcagccggccacgatcctgcccatcctcctcccgcccgtcccattgattcgcgggtttcctgcaaccccgggacccccacgggagatcccggccggagaagcgcccccattcaagcccagagaggggccacgcctgtcggaccccccgtcccacgccaacttttcagacacagcagggccccgcgcagccgggtgcgctccgacagctcaagttcacgcggggaccgactgcagagcggggtcccgcgctgcgacacccggcccggagcccaccccgagggcccgcaggccgctgccccccgggtccgggcacccgttaggccggccgagggggtgtgtcgggccggcgcaggccccgcgagccgtggggtggccgaggtcggcgggtcctcggcgagacccggcccccacgcccgagcctctccgggccttcccccgccgctcaccggcgcaggagcgcgtcttccagatcttcagcagcaggatgacgatggccgccaggtgggacaggtccccagtcagccggaaaatgttcatggcggcggcggcggtggcggtcggcgcagcgcggcggccccggggctgggcggctcaggaggcggcggcccctgagaggaagcggcgaagatggcgagatcgcccgcgacgtggccagggacgtggccgaactgccggcgcgcgcgcgcgcggggcaccctgggagagcggggccaggccccgccccttaaagggggcgcgccccagcgcaggctcagcaggtcagctcgcagggactcccttgcaagaagaccccggactctgccaaattttccctgccgggtttccggcttctcctcgggtgccagcagtttcctttacttttttgaaataacactccctggggatcttttctttcctcccacatatcaaaagagctctacaggcctattgtatgaaaaagtgtaagagaaggccgggtgcggtggctcatgcctgaaattctagcagtttgagaggccgaaacaggaggatcctttgagcctaggagttcgagaccagcctgggcaacctaatgagagttcctccaccccccgtctctacaaaaattttttaaaaaattagccaggcctgatggtgggtgcctgtagtaccagctattttaaaggctaaggcaggaggattgcttgagcccaggacatcgaggctgcggtgaaccatgattgtaccactgtattccagcctggacgactgagtgagaccctgtctcaaacaaaacaaaacaaaacaaaacaaaaaaaagtacaagaggaaaaaaattgatttctgattgcctcactcaagataaggtcaacattgaaggtggaggtggaagatgcagtttatgtaggggtctgaagattttaccattctggggactgtctttaagaaagagaatccaaaattaggtagaaaagtgaacgtctgaccgggcgcggtggctcatccctgtaatcccagcacttaaggagtacgagacgggaggatcacgaggtcaagagatcgacagcatgctggccaacgtggtgaaaccccgtctctactgaaaatacaaaaattagccgggcgtggtggcacgcacctgtaatcccagctactcgggaggctgaggcagggagaatcgcttgaacctgggaggagaaggttgcagtgagctgagatggtgccactgcactccagcctggcgacagagcaagactccatctcaaaaaaaaaaaaaaaaaaaaaaaagaaaaaaaagaaacttgaatatttctacgggatggggacgtcacaagaaattgcaaacaaaaaaagctgacaaacaggatctgctacataatttgcgggacggagtgcaaaacaaaaacgcacagttcgcagttcaaaaagcagggcgggggcgaggacctggtgcggtggctcatgcctgtagtcccaacactttcggaggccgaggagggaggatcgcttaagctcaggagttcaaaaccagcctgggcaatatggcaagaccctgtctctgctaaaaatacaaaaaaaaaaaaaaaaagaaaaaaagaaagaaaaatagccaggcatggtgatgcgcacctgtgctcccagctactcaggaggctgaagtgggaggattgcttgggcccaggggccaaaggttgcattgagcggagattccaccactgcactccagcctaggcaacaga

SEQ ID NO: 143 - DNA, 16769 bp, Homo sapiens
  source 1..16769: mol_type = genomic DNA
ggaggaaatggcaaggtctgggagagcccagacatagaaggaattggttagaggtgaggacacaggtgggcaatgaagaccgcaggtgcccataaatggggccaaggaggtgggattgaatactagggagttacgggaggtggttgagcaagacggtgtcgaggaggagctagggagtgttatggttcttatcttctagggctgctttaaaaacgtaataaacacaagaagatgccggcacgatggctcccagaactttgggaagccaagtctggaggattgcttgaggccagaagttcgagaccagcttgggaaacatagcaagacccctgtgtcttttttttttttttcttttgagagggagtttagctcttgttgcccagactggactgtagtggcttaatctcggctgactgacacctccgccttctggttttaagcgattctcctgcctcagcctcttgagtagctgggatgacaggcgcccgccaccacgcccggctaatttttgtattttagtagagatggggtttcaccatgttggccaggctggtctcaaactcctgacctcgtgatccgcccgcctcggcttcccaaagtgctgggattgctgggattacaggcgtgagccaccgtgccccgcctttttttttttgagacagagtctccctctgtccgccaggctggagtgcagtggcgcgatctcagctcactgcaagatccgcctcactcacggttcacgccgttgtcctgcttcggcctccggagtagctgggactacaggcgtccgccaccacgcccggctaattttttgtatttttagtagagacgtggtttcaccgtgttagccaggacggtctcgatctcctgacctcgtgatccacccgcgtcggcctcccaaagtgctgggattacaggcgtgagccactgcgcccggctggctttttttttttttttttgagactgattttcgctcttgttgcccaggctggagtgcaatggcacgatcttggctcactgcaacctccgcctcccgggttcaagtgattctcctgcctcagcctccctactagctggaattacaggcgcagagatggggtttcaccatgctggccaggctggtctcgaactgctgacctcaggcgatctacccgcctcggcctcccaaagtgctaagattacaggagtgagccaccgcacccggccgaacctcgcatcttaaaaacacacagacacacaaaagctctagagagcctcgcggagctgtaaactacagctcccaagagacttcgcggccgaggcctccgcccacttccggatctcactttcattgcttccaagtaccgggaggtgctttgcttcttcaaccgaacttgaccacaatgggaggaggcgtggcaaccaatgggcgcatgagttagctggatgcggccaatggaagcgtgcaaagcgctcctatgtgggggcggggctagactgcacaccaatgacagggaggtggtggcgccatcagtgtgggctgtgccgtggctggaagttactgtgaggcggcggctaagaaggcggctctggtggcggcggtggaggctgaggcggcggccgaggcggcgacggaggaaacagaagatggtgaggatggcctccaggcccccactccccctctgctagacaaaatggcgctgtggtcccacccacctctagtatccccctaggcccctctccgttctgcccggtcccctcaggtccggcccgcccctcccactcacctgtgaccttcgacccccggaccctaccgagagcttcctgctgatcccactgccactccttctccgacccctgaccccatccaggataccaagccctgacaactcattcatttccgggttgcggctccccccggaaatcgtctggggtggggatggggtcccgtaagaccccctggtctggcctcgttctcagcacgccggacctggatctcttcagttcaggagaatttgggaggccggcctgggccccggggcgggggagggggcttggcaccgcgatatgcagggctttgtcgccaaaggaagtgcgacatcgccgattgtcccggttccccgggccctgaccccacctccaccattctgggcccttacccgcctctaagaatgaaaaacttttatctccgatccgcatggattgtccctgtgaaatgagggtagcagtagtctgaacctcttagggtggtgacaatttaggtaactgacgtcgtaaaggactcaggatagtgaatgctcaacagatgagctgggtgactcgaggccagtgacgttctcttctagctgtcccctcattatgaagtgtggatcgtccccacctggctgttggaaggttgaaattccttcagggttcctcagtcatcctggaatttgggtctggtggttcttcggggttcagtctccccacctgaaaagtgggatggtgacccaccctcagagtggaactaaagcctctccacaacccccattagttggcatcctgagggctgggaagggtgatgggaagcttggtcaagatacctcaagtctcctttgtcccctgacccagagtcccagcccacaatccacagtccttgggatgtggtggggatgaaaggaagactccctttcaggaaggaaatgggaaggtgggttcctagtgtgcgggtccccaagcctgggagttgtccttgataccttggtacagtctcatccctacagccaatcataagtggattagattgtctctgccttctgaacacacctgaattcatccatggcttcatgccctgttgcaggtactgccacttcccacctgcatacctgtcccagcttcttccctggtctcctagccttgctctcacccctttggcagttcataattcacctgaaccagaaggaactttttttttggagtcagggtctcactctggcgcccagactggaggctcaagagatccccacaccaggctcatttttgtactttttggagagatggggattccctatgttgcccaggctggtctcaaactcctgggctcaagtgatcctgcctcagcctcccaaagtgctggtattacaggtgtgaggcactgcatggggcctgagaaggaggttgttttttttttttcttttgagatggagtcttgctctgtcgcccaggctggagtgcagtggcatgatctcggctcactggaacctccgcctcctgggttcaagccattctcctgcctcagcctcccaagtaggtgggacccaccaccatgcccggctaatttttgtatttctagtagagacaggttttcaccatattggccaggctggtcttgaactcctgaccttgtgatccacccgcttcggactcccaaagtgctgggagtacaggtgtgagccactgcgcccggccagaaggagcttttaaagatgtgcatcaaatgataccactttctagcctataaaatgctccaggaaccctggcggctcccctcctcaccctgaggcccctggccacctctatgaccttatctccactctcttctccactctgtctgtgagcttcagccaccctggccttgttttcacttcctcacactccaggttcctgctaccccagggcctttacacctgctgctctttctgctcggaacactcttcctcctgtgatcgaggtcattcctgactttggggggcccccagttctctgctattagtgtactgcttctctttctcatctctttgttgggtctctggcaggctacctgcagtgggactggcacacaggtgtccagtgcgtgtctgctgaggcacctgtgagggcccagccgtggctggcatttgtctggaatgaggcctcccccaccccctgcccccatgtctcgaggccttgttttccagcttagcatgacaggaaggctgcacgtaccctgccttcattcatttgtccaacgcagacatgttgatcctaaaggctgcccctgagggagctctgtgcaaagcattccccttgttgtcttatgactcagagtaaccctgggaggtggccctgttggaatgcgtctcttcacagggaggcccagaggctgggaagtccctcgtcccaggtcacacaaccagggacgggctaagccaggattgagagcagaatgcccggagtacctgcacctctcgccactcagccaccgggccctgtgtgagcccggccagggttcagtcagccctgtcctgtcctcttcccttggggaggtaccagtccagccagggaggtggacatgtaagcagatgacctcgccggggtgtgagggaggctctgggagaggctcccgaagtgtcgggggaacaaaggggccagggagggtgttggagctggtggggaggttagcaggtatttgccacatggaggcatgaggggcattcctagagggtgtgtgtggcagagggtgtgtatgatgggagtccagcaggggcaagctgggccagggctgcgaagggggacagggacccctcctcacccttcaggtctcagtgcctgcatccctgcgtctgggcagccctcctttatcccctaaatgggccagagctctgccttgcacctcacactgcgccctcgaggcaccctgtcctgcagccgcttcctgtgcactgtgcagctctttgccccacaccatctcaaggccaggcgcgtggccatggtggctcagtccagtgccctggtgcctgctagggccccagaagaccttgctgaatgaatgaagctggccccagagccgggtgctgagctgaggctggcatcctagggtgggaggggaggcaggtttgagggactttgaacaggtcctggggcagtaggtcatccagatgtgacggctgcctcccgggtgggagggggaggcccacccagccacattccggcttcccgagagggaccagcagaggaggggccagatgtcatagaattggggacactgctgttcctgcctgtcccagagggtggtgggaaattgtctgaatagcagcttctcccagggcagctctcttgggcctcaggcatcaggggatggccttcccttccagctctgtagcctgcaggggctctggcttttgcttttcaggtgtgtgatgaagagaaggagcttggcttctgaggtggggtacatgtgggttcaaatcagccccctggttttctgactgagactgggtaacctctctgcctcggtgtccttgcctttgatagggagacactacctcctgccccattgggtcaggagatcatacatagtgagctcaggagggccccgttcagggcaagccatgtggagagactcgcagcagacagtcccaccactggcccactccagacctcactcacagggttggattgaaaatggctttttttttttttttttttttttttttgagacagagtctggttccgtctcccaggctggagtgtagtagcacaatcatggctcactgcaacctctgcctcccgagttcaagcgattctccagcctcagcctcccgagtagctgggatcataggcgcgcaccaccacgcccacctaatttttatatttttagtagagatgaggttttgccatgttggccaggctggtctcaaactcctgaccgcagatgatgcgcccgcctcggcctcccaaagtgctgggattcaggcgggagccactgcggtatgacttttaaccagtggcctgttctcttgcagcctcaatttccccacctctcacctaattagggggctgtcatgaggatcccgtgggggatgtgcacatagcctggcctggttacttttctgtggtcccgacagtgtatccagcagccagctcaagggtgtgttctggaaaacttgaactacaaagaatagtgggaagaaggaacccagcagtcaccctgcaggtgctccagggatgagctggcccttgcctgttttctcatgtaccatcttccatgtcttctaggcagattttttgaaaggactgcctgtctacaacaaaagcaattttagtcgatttcacgcggactccgtgtgcaaagcctcggtgagtgcgtgttcctgggactgggaggaattggtcacttccagggggcctgggggcagcttgtgtcccccgattggggtcttggctggaacagaggctgatcttcaagcccagccccatccacatacttgagtgtcttccaatctgcactgaagggtgggtgctgagtggagggatgaggagaccccaggcccatgcactctcctaacccaccccttctcaaccctcctgcagaaccgacggccctcagtctacctgcctacccgcgagtacccgtctgaacagagtaagtggccgctgtcagtctgtcccattctggctgctgaggggcggggtttggtgactgcagcgtggcacgcggaggttatcttcaaccccggcccaggccatagacttggcttgggttcacacgctgtctactgaatccagttaagtcagggagggcctccagggaggtacaggagggggaccttgggggcttcagcctggggatgcacacgtggatgcctgtccactcccagcccctggggacagccagaaacctggctttccccaggtgtctcttgattgggacacactgggatccacagccagcccaaaggggcccccaagttgtccctcatctgccactcactggtcctttcccctccctgtcagatgaggtcaagcgagaactctggttctaagacaagtgctatcgggcagagaggcagcagagggctacaggggcttgggctggggatccagccaagcctgggtggcagtgatgggaagggggtccaggcaaaggggcccacagcacaggaggacttggtcttgctgtcttagtttaactgttcaaaaagactccacaccaggtggggtagctcccgcctgtaatcccagcactttgggaggctgaggcaggaggattgcttgaggccaggagttcgagaccagcctgagcaacatagttagaccctgtttcaccaaaaaccatatatatacgtatatatacacacatatatatacacacacgtatatatacacacatatatatacacacacgtatatatacacacgtgtatatacacacacgtgtatacacacacgtgtatacacacgtgtatatacacacacgtgtatacacacacacgtgtatatacacacacgtgtatatacacacacgtgtatatacacacactatatatatacacacgtgtatatatatacacgctatatatatacacacgtatatatatacacgctatatatatacgctatatatatacacacgtatatatatacacactatatatatacatacgtgtgtgtgtgtgtgtgtgcatatatatatatatatatatatatattagccgggcgtggtggcatgcatctatagtcccaggtgggaaaatcagttgagcccaggagctccaggctgcagtgagctatgattattccagcctgggtgacaagagtgagaccctgctcttaaagcatttatccatctggagcctgtggggtgggactgtgtggtcactgggcacagatatgcggtatgtgctcctagtcagcctgggagaaacataggcatgagagtctcagttgcggggcttggtcccccaccaagggtggaatcccttgcagggagccgggaccctgaaagcagctggctcaggcctctgggagtagctgcgagtgtgctcagaagcaaaaacatgggacttttggagatctctggagttgggggtactgagttccagccccaaaaagacctcccagggcagtgtcaggggaggagcctggggaggggaggcgtctgcgactttctctatctttcctccttagtcatcgtgacagaaaagacaaacatcctcctgcgctacctgcatcagcaatgggacaaaaaggtgaggcccacagggctctggtgcagggattgtgggtggacagagactgggcacctggcaggggcttctgagcacaggaaggactctagtgattggagcagggccttgagggctgggtaggagtgccctgggcgatccaggagagggaagagcgttccagtggagggaaccgctgtgcagaggccacaggacaccagtgctcaggaggctggaggccaggcccaagtagccgccaggcccagttttccatggctctggcattaggtagactgtattggtatgaactagatagaatattttctgaggccgagtgtggtgacgcatgcctgtagtcccagcgctttgggaggctgaggcgggcggatcacgaggtcaggagatcgagaccatcgtggccaacatggggaaatcccgtctctactaaaaatacaaaaattagctgggcgtggtggcacgtgactgtaatcccagctacttgggaggctgaggcaggagaatcgcttgaaccagggaggcggaggttgcagtgagccgagattgcaccactgcactccagccttgttgacagagcaagactgtctcaagaaaataaaaaaaggccgggtgaggtggctcacgcctgtaatcccagcactttgggaggccaaggtgggcagatcatgaggtcaggagatcgagaccatcctggctaacatagtaaaaccctgtctctactaaaaaatacaaaaaaaaattagccaggtatgctggtgggcgcctgtagtcccagcttcttgggaggctgaggcaggagaatggtgtgaacctgggaggcggagcttgcagtgagcctagatagggccactgcattccagcctgggcaacagagcgagactccatctcaaaaaaaacaaaaaaaacaaaaaatcttttctgaatggtgaaatgtgtacacatgattaaaaatctcagctgggcgtggtggctcacacctgtaatccccgcgctttgggaggcctacgcaggcggatcacgaggtcagaagtttgagaccagcctggccagcatggtgaaaccccatctctactaataatacaaaaattagctgggcatggtggcgcacgcctgtaatcccagctactccggaggctgaggcagaagaatggcttgaacctgggaggcagagattgcagtgagccaagatcatgccactgcactgcagcctgggcggtctcaagaaaaaaagaaatctataccgggcgcggtggctcatgcctgtaatctcaggactttgggaggccgagtcaggcagaccatgaggtcaggagatcgagaccatcctggctaacacggtgaaaccccgtctctactaaaaatacaaaaaattagccgcgtagctgggtgtggcggcgggtgcctgtagtcccagctacttgggaggctgaggcgggagaatggtgtgaacccaggaggtggagcttgcagtgagctgaaattgcaccactgcactccagcctgggcgacagagctagactccatctcaaaaaaagaaaaaaagaaatctaggtaacatgtgagggtgtggctgggtgtggtgattcacacccggaactgcctgagaggctgacgcaagcagatggcttgaggccaggagtttgagaccagtctaggcaacacagcaaaactccatcactaaaaaaaaaaaaaaaaaaaacaaattagctggctgtggcatgttcctgtaatcccagctattcaggaggctgaggtgggaggatcgcttgagcccaggaggttgaggctgcagtgaatcatgatcatgccattgcactccagcctgggcaacagaaccagactctgtctctagaaaataaaaataagagggtgtagttgcagcgaagagtcatctcccgcctcccgcttctggtgccccagctcccttcccagaggctgcctctgcacacgggatatttttcttctttttctttttcgtttttcattttcttttgccctgccctgccctgcccttcccctcttttcccctttttttccccctttttcctttcctagatgaggtcttgctctgtcacccaggctggagtcgcccaggctggagtgcagtggcgtgatctcggctcactgtaacctcctcctcccagtctccacctcccaggttcaagcaattctcctgcctcagactcctgagtaggtgggattacaggcacgcgccaccatgcccagctaatttattttattttatttatttatttttttgagatggaggtttgctcttgttgcccagactggcgtgcagtggcgcgatcttggctcactgtaatctccgcctcctgggttcaagcgattctcctgcctcagcctcccgagtagctgggattacaggcatgtgccaccatgcctgattaattttgtatttttagtagaggcggggtttctcgatgttagtctgacttgtcttgaactcccgacctcaggtgatccacccgccttggcctcccaaaatgctgggattacaggtgtgagccaccatgcctggcctaatttttgtatttttagtagagacagggtttctccatgttggccaggctagtctcgaactcctgacttgaagtgatccacccacctcggcctcccaaagtgctgggattacaggtgtgagccaccgcgcctggccttctttttttttttggagacggagtctctctgttgcccaggctggagtgagtgcagtggcgtgatctcagctcactgcaacctccgcctcttgggttcaagcaattcttctgcctcagcctccagagtagctgggattacaggcatgagccaccgcgcctggcaagtttgttttttttttttttacctaacattgaacagtgggtggctgcctaccctgcgcaaagttggaaggtcgggggactgtgtggcaaagtgactgcttctgaaaatccaagctgctgggcccacccccaccccttctcctgccccccaggacttggtttccacagcggggaaggaggcgtgtgcttctgtcttgcgttgatgtgcggcatccccagtggcttccaaaggccctttattcccaggctgggtgggttgctcctctgagtgcttgagaaaccagccctgtgtgggtcattgcatgtggtgggggtgactccgggtgccaggaaacacctgtctatcaccaggcatgggtccagaaagtgctctgggcagggcttagtggggcaggtcctggtggtaggaggggctgcctagccagggaccctggggccccccactgtactccaggcctacctctgtgatgctgctgcaggggcctgggctggcattatgactctgggagcttcacccacgtgaagactcacagcctccagctgggcaacatagtgaaacccccatgtctaccaaaagtaaaaatattaagcgtggtggtatgtgcctgtagtcctagctactccagaggctgagctgggaggattgcttgagcccagaaggttgaggctgtccgaaaaaaaagactcacagcccctctcttttccctgtcccccagaacgctgccaagaagagagaccaggagcaagtggagctggaaggcgagagctccgcacctccccgcaaggtggcgcggaccgacagcccagacatgcacgaggacacttaagactctcaactccacaggcgcctcctgccaggtctgctcctcggtcgcccacccgcctgcccgccatgtgtaagcaccccgcccgcccgcctccctgccggcccatccacaccctgcgtccacaccacttccaacctcataggagccgatgtatttattttccttgagtttttatttatgctgtaacctgtatcaagcgttggttaaaggggacatcagacccagtagtgtgatgttggtagatgctttttaaaaaaaacaacattgtccccccgacccccgccttccatcgggccagttccccgattcctgcccccagttctccagagaaccagagtgtgtctgtgagagtctctagcgggggctttactgtggccgggcgacaggggcgggcccggggtggcctgacctaccaggacagccgagtggccttctcccccccaacaccggtccaggccattgagactcggtcttgtcccacgcttcgcccggaactttcccatgcccaggcctcactcagcgtgcacgcacgttggggagaagtcggcccttgggatctttctcttgagtcattttatttttatcatggactagtgcgtgctccgtgtccaccccaataaaagggtctttcctacttgacctcgcgtctttgctccacacaccttggctgcagaggacggagcccctgggagtcatccctgttgtcaccaagaggagtgagaagggccccccacgccaggggccccaggaccggctggattctctcgtgggcttgctgaggccaccatgttcaaggccaagacctgcctggaccatcccctctgcctctcctgtcaaggtgaccccaaggacaggtcattcctgagagacggtccatggtgccaaggatggagcggggtcagccccctgcctgggataccgccaagcagggcagcgcacctgtcagacaccgcagagatggccggcctcatccgggggcctggggtctctggcctctgctgctcccctgaggcatggtgacagtacagacggcatctggccggtcttgctgtcctaggtggtggcctcacccttgctgggtcatagaggagctgtacagaaggttggcacctggcagttggcatgtgccatggccgctcatggggacccctcttccgccagctgggctgggtttggggctgagcttgggtatgtaggggtgttcgggctctgggcagaaggtttgtggccctgaccactgagcctggggctgggggaacaccgcttctccccttattgcccccactggtggtggtggggatctcagttttcttttgttttgttttgtttgtttgtttgagttggggtcttgtactctttcccaggctggagtgcagtggcgtaatcacagctcactgcagcctcgacctcaagccttcctcccacctcagccttccaagccgctgggaccacaggcacccaccaccatgcctggctaatttttttttttttttgagatggagtctcgctgtgtctcccaggctggagtgcagtggcaagatctcagctcactacaacctctgcctcccaggttcaagtgattctcctacctcagcctcctgagtagctgggattacacgcgtgcgcccctacacccagctaatttttctatttttagtggagacggcgttttgtcatgttggccaggctggtctcgaactcctgacctcaggtgcttcgcctgcctcggcctcccaaagtgctgtgaccgcacctggctgcctggctaatattttaaaaattttttgtagagacagggtttcaccatgttgcccaggctggtctcaaactcctgggctcaagtcatccaccttcctcagcctcccaaagtgctggggttacagacgtgaaccaccgtgcctggcagaggtctctgttttgagagctgagtctgagggcgttgggatggtgtagggttgggccacagagctagcagacactccgggctatggagggtccgcctgccccagattccactgtggagggccctgcctgtgtcagaccctcgggcctaggcggcccatctctcccaaggacggagagtgccagggtgggctcccgtcctacacaaggagtggctgaccaggcccaggcacagcacagccaccctgctgtacctcccagctcccggcagtgtctacaccacagtgatggtgctacaggggccatgtggtcacaggacaggtggtcaggaaatgcacacttgactgcggtcgatggtgccgggtccggctgaatgccctggaggctcccaggccagctggggagtcccagtccccagggttggtgtgacctgggcaggcctgcggtgtccatctgtgaatgactgagatggtgggacttcagcttccaaggccaggggccagagtgggagcagggggcactcccgcctttcccctcggcctgtctagacctctctggctcccagtttctgctttgagtggctgggggctgtctcctgcctgtgctgtctgcccgtcgctctgcagggctgctgggcgggcacctccttcccctcccctacctcagctccctcctttggggtctgagggctgtgccccagcttgcctccctgtggcctccccctagaacccctgggtctgtcgggacatgccccacctggcacacacaccctgtgtagctcccactgcctgtgggaggacgctgggcccctgagccggcctctgtctacccctcctgcctttggggtcccctttaccccactgttcccccaaactgccttccaccttctccgcctttgcacaggctgttctcctgcctccagtgaactctgacttctccacagcctcccaaagggccccttgctcacactggcccagccctgcagcatggccatgttggtctctgagccttaagcctttggatgtggacacatttgtcctcttcctgaaaaatgtgagggtctgagaggccacgttcctgttcctgagtcatacgacagagtcccagtgacttgggtctgatgtctgtcccacagtgggacatccctgctgcatcccaatgccaccccgtgtcctggggacacccaaatgtgccattctctcagtatcacaagtcggggactgcaggaggctcaggtgccaggtgccttctgatgttcatgccacaagctcttcccactgtctctggctccccagacgatgttccaggaggcgggtgtgccagaaggggccacgtcttgcaaaccaccgcgctgtcctctttgagaaggagtcttactcaggactggggcctgtgcacacattgtcgcctcttttcagcacttagagattccttcctttgtctagtggctgaagccagggctgaagttggcctccaaatctgggccgtctcagaggcggcgcagcctggagttttccatctgtggccaagacccagtttttgggaggaggccctcatgggtcaagccagcctgtaccaggatggggggagggggttcccaacctaggccccagccacccagactcccccacccccactcccttttccactgctctgacctcgggcactgttgaaatatagtttttattgcatttctgccgttttacaaaaatatgacaaaataaattaaaaacaaataaataatcgcctgttctgtgtgtgtgtgtgtgtgtgtgtgtgtgtgtgttttctgttggatttgtgggtttcctttcgtttggaaaggaaaacggcagatggggggcaccgaccaatactgggggccctcgggggctgaagcgcattttgcattttggagaccggccgcccctgtgaatgactgatattgcatatgagaagagaaggcagggcgggtagagctaatgccagccgctgggccagcacacggcctgggggctggggctggggctaggggagggcgctggggtctcgaggggatccgaggtgggcggtagcggtgggggcgggaggctgtaaaagctggcgtctcccggcaggggctggggggcgggtgggggcccggccatggcacagggtgggcactcggcagcggccagggcctggcggggggcggcaccctcgcccccgcagccccagggcccgtcccactgccagcagcctgcgggcggtgtcgggggccggggcagcggcattggcggcggcggcgcggggctccggctgcggcgggtgcggagggcaggggcgcccacgggggccagcgctgtccctgcggaggcgagaggggccgttccggggggatgccgcccccgccggaccccgccgggctggcaaccctgcccgcgctccctcccgggcatccaggcacataaaggccttattgcttctgatcagagactgaggtggggcggccccctgggcggcttccggtgcataccctgcctctgggcacggccctgccggtcacagggggaggacagtttgaggaagtccctctggcttctgacctatggcccttgtgctgcagctgccacctgttgggctccctgggaatggggttgctggagcccaggctgggattggggcaggggaggtggtgggggtgggagggtaggggtgaggcctgcacctctgctcagcacatgtgggagctccctgggtgggcagccccagccccacctcgaggaaggccttcctgaacagctgggctgcagggtgtggatttgcatagaggcctggggggtcaagtcccccccaagagtgagctggagcaggagaagggtgggctggttgggaaacaggcctccctcatctctcctggcaccggagcatggtgggggtccctgggtgcagtcctgggacaaggggctttggcatccctccctggggagggtcaggcacggggctccaggctaacaaaggccctggagatactaagcaggctttaactgagaggctccacgtaccactgacccaggtccccaccaggacctaagaccgggcttcccctgtccccttcagcccctctccccaggcctggccaccctaccctatccccaaagccggcccggcgtccccacccccgagttaaagcttgtgacctgagccttcctcttcgggccggggggcttccagctcctcagccagggcctcgtccaccggcccactcctctgaacccggc

SEQ ID NO: 144 - DNA, 11465 bp, Homo sapiens
  source 1..11465: mol_type = genomic DNA
ataaagaataaagttaaacagtcagtcccagtgctgtgtaggtggcagtaagtctgggagagcgacctcggctgaactaactgtggtgtgcatcattgttaagcagggccagcaggatcctcatgtcacctggcaggaggagggacagggaagggtccctagaagtgaccttgagttgcacttagtgctcttggcagagggaagggcttgggctagtgctggaggcatgaagatggggtgtgttcagggctctccagcagtccaggcatgggaaggggacgctgagggccaaaggcggaggtgacactgggaagggaactagcaaggtgaggactggcttttggccatgtgactgaattgcctgtgtggtgcgtgtgtatgtgtgcgaatgtcagtgaactgtgtgtgagtgaattgtgtgtttatgtgtgggtgtatatgtgtgtgatgtgagtgaactgtgtacatgggtgtatacgtgaattttagtgaattgtgtgtaaatgtgagcagtgtgaatttgagtatgtgggtggataagtgaattgtgattttgttggtgtgaattgtgtgcctgtgtgtgacggggagtatgtgtgtgtgtgagtgaactgtgtgatgactatgaatgtcagtgaatgctgtgattgtgtgtgtgtgtgtacgtgtgtggggatttggtctatatgtgtgaatttgagttgtgtgactttgttggatgtgagtgaattatgtgactgggtgtatatgtgtgtgtacacgagttaactgtgtgtaaatggtatgattgtatatgtgtgtgaatgtgatgaatcgtgactagatgcgggtggatgtgtgtatgtgcatggtgtgtccatgagtgtgtaagtgtgcaggtggcacagttgcaacaggagagaagacacaggaagccttacctgccattcatccccccagctgtcctcccagcctggggacccctgggctggaaaggttatgaaaagtggtgctactgccaggaaggggtgatggggcagctgggaggacggtttgagtcttgccaaagggagggagtcgaagcttgcaaccctggggaggaggaggggcagactggggaccctgcttctggaaaaccagcgaccaacccccaaagggacacaggcaacccctgcctccactctacagtggggaaaaggggagagtggcgtggcaggctgcccagccagtcatggagggagtagacttcaggaggagtacagaggtctggtcccattttggggctgaggacaggagcctcaggtcagcagtctgcaggaaggccccagctggaccagctgctcacaccttcccacaggcctgcagatgggtgtggagagcagagcctccaggctgagtctcccagccccagatctgagcagtctaaatcatccccctccaggttccctacggtcttatccaccagccctgctgcccatggtggccccagatgcccaggagagataatagaaggtaagaagtcatgtttgaatgaggaagctctcttcatttatttcatatgaggatgaagaagaggattatgtgatcacaggaatgttgcatgcgggataatccaaagctggttatctccaggccctcactctgccaagagatctctctggaagaagcagccagttcacagatgccctggatccctccgtgcccaatcataaaaaagtcatgaccgtccctatcttgccaatctgccaggactccaaggggaaaaagcggataagtatccttcaggagacagagaaaaagatatcatcagctccttggctaataccacatcttgcaagacccctgccaggtactcccactgtgggtactcaggacagcctgcctcagtccaccaggcattttgcaaacctgctcatcccaataatgattttccccaacccccagcagggcagtgggacactcaggtgtgggaggtagccgcacatcatgacccagctaggacagacacacaatacagtagcctcggtgtgtgtgccgtacactctatcatctccatcagtttgtgtactgaggggtaccctgcctcctaattgcaggctccctaagggcacagtacctcagccacctgttttctcaaaggctgagcacagggtgaccccccaccccaccaaccccgccactaatgtctgggccataagtgaacatgcccctctcagaggtaacagcaagtttccagtgaggaaaaccagaacttgggacagcctggttggggcgggcgggagtatgaacagcctgtcttctcatcataaaattggcataatggagattatctacctcatggggatagcatgtcttgtctgagcaaagggagagtggatagggattgtaaggatcaaatgggatcatgagtgtaaagtacctgtagaggacctagcacatggtaagtgtataacacttgttgttagagtaacagttttccctgagtatccgtgggagatttgttctagaatccccagaggaaaccagaatctacatttgctcaagtcccttacataaaatggtgtaatatttgcatgtaacctacacacatcctctcatatactttaaataatctctgggttacttataatacctaatataatgtacgtactatgtaaatagttgtattgtttagggaataatgacaaggaataaagtctatacgtattttcagtatagatgcaattatcaattttttttcctctaatatttcaatccatggttgtttgaatcaacagatgcgtaacccagtgatacagggggctgactgtattattcctctgtagcttgagggaggacccagcaggatcagccattcctcatcgaccttcatggactaacaaaggctccatttcagaaggtctttttttgtgagccaaggtctcactgtcacacaggatggagtgcaatgcgcaatcatagctcactgcagcctcaacctcctgggctgaaaccatcctcccacttcagcctgccaactaagtgagactacatgtgcacaccaccatgtccggttaatttttaaaactgttttgggggatggcatctcactatgttacccagactggtctacaactcctgggtcaaatgaacctcccgccttggtctcccaaagtgctgggattacaggcatgagccaccgtgcctggacagtgtcctttcaagcttctcatgcccttacttcctcctagacatggatgtggctcaagaatatcttttacccaagaggaaactttaactcggtcacagaacgccaggtttgggttgcagacgcttcttgtgggggagggaggtcttttcccctgtattcacagaagaggaggttgccaactggagatggttcatttccaagtttgtctggggtcccccagctatgcaggacccagaaagcagatgtctagacatccaggccaatggtctttcactactctgtgagtctcccgtgaacttcacctggaacctggctgggacacaggtccaaaatacgtaacttcagaacatacccagaattccttctgaccagcctggaaaagttctagaaaatcacacttcagccacgtgtacctaccctgtcaggtgccaaggcaggtacagcacacagacaatcccacatgacccttgcactgccccgggggtgttaaaagagagccttcccggttcacagacttacacactgaggagcagagccagaaattcattcaatcctgctcgcactttgaagatggtcctaacagcaggaacctaaggggtcagggggccccaaagctccagaccctgatgtgtccttactgggcagggcaagaaatgggtttttccccctgaggcaggatcagtggctccagtctgcggcagtcccacatggatcccctactacccctacgcaccggtcctggcccagggctagctccttggtgagaaactcaaagaagtgggcgctgtggctgcggttgtcctcggcggtgcccactacgccgatggaggagatggacagctgcgcgcagggctcggtggacccgctcagcgccatggccaggcccggccgtaccgtcacgttcacgcgctgagggggacatgaaaagttttgcccgaagttggagccggccgggctacctctggggacgggacccgagcgcgcgaaagccgaaacgcgcagtgttcgcggggcagggatcccgatacgggccgcggtccctgaaggtcacgcccgggtcatgactggggagggcgacaagggaaagacgtgcggagggggagccgcgggatcgtggagcacggaaagtcagagcttggcgtgaggaaaggagtggggagtggtccctggggaaaagattcggggtcactgtcggggaggcggagcagggacagggccggacccctggcccaccaacctcccctcgccccgtgctgcccggcccacgcttacgtccgcaggtttgcccaggatggaggcagcggcggcgcagagtcgtttctccagccccgcgggcactcggttggcgggcaaattcgtgtccagctccaggaacggcatggcgggcagaggaacggaaacagctctggcggaagaaaagctgggggtacccaaggctcgcggaccagggaggaggggcgaggcgccacagcaacctggcttctcattggctggacagagactcggcgctccccgattggctgcctagggtacctcccgcttctgcaaacaaaagtcacgtgtgccggctgatttccggaagtcccatcgtctccgccctacgtgtagccccacccactacaggtctttaacccggtagtggacccaccctgtctcccccgaccctcctgcctggcgccaggtgggtttccctctcaagcttccgcgctgtggtcgcccggttcctagccctattagaggtctgaacaccacacccccgacacacaaggacacacacacacctataggggtcttccccaggctcgaccctaataaccaatacaacgggagcttaaagtttttttgaatgatttgccaccatttcgaagtcaggcaatttcatgttcagtatggaaatctgcgcttgggcagtcaggagatgtggttactcgcgggggcgcgggtagggctaggctcacgacaatacctgtccctgcctggtccccattgacatctgcctgtgtagcctcttgtgccggtggtgagccactgtccaccagggggtggcaaaatatgttctttaaaacatggaaaggccgggcacggtagctcacgcctgtaatcccagcactttgcgaggtccaggcgggcggatcacctgaggtcaggagtttgagaccagcctggccaacatgacgaaaccccgtctctactaaagatacaaaaattagccgggcgtggtggcagacgttgtaatcccagctgctcgggaggctgaggcaggagaatcgcttgaaccggggaggtggaggttgcagtgagccgagatcgcgccattgcactccagcctgggtgacagagcgagactccatctcgaaaaaacatcagaaaacatggaactctgttggcgtggcttaaacatgagtgtggtcagtgtggcaaaatcacttgaattgtacattacaaatatgactgaagttgtggtcgagcaatgtggctcacacctgtaatctcagcactttgggaggctaagaagggaggattgcttgagcccaggagttaaagatcaggctaggcaacatagcaagattctcttctttattttctacaaaaaaaaaaaaaaaaaagaaagaaatctgggtgctgtggtgtgtgcctgtagtcctagctacctgggcggctgaggcaggaggattgcttgagcgcaggagatctaggctgcagggagctatgactgtgccactgcactccaccctagatgacagagtgagacccaggctcccccctcccccacaaaaaagaaagaaaaaatttgcaagtttatatgtacaatttcaactacgtgtataaaattctctataagtgtgcatacttaaaggagcctccactgaaaggccgacagagtctctgtctgtcatgatcttgtcctattagcagtttgtttattagatgactcagatatcagaaggtctgagacacacgacaggtaaatatgacagtcctaaggggagagggcagggacaggtggcaagtctgggaccaggtgtggggcatggacaagccagtggtccgggagtggggtgtagagaagactgtggtcaaggttatgaggaggcatgggagagggccaggaaataaccagggacttcccttcctgcaaggaggttcatgaaccagccctgcaccccacttgtggaacacaacatcgccccacagtgaggagagagaccgaggagaccaaggctgatcctgattcagacatctttccaccaggtcacccctcatcgatgatacatgctcagtccgggggtatcccccgcaaggaaacactggggctgaggagcccagagaggtcgcctgacctggactggggctggggaggtcagggaagtctccctggagaagagacagggtgccaaatgccaaaagaccaggaagggcaccaggcgaagatgaggagggaacagcatgagcggaggccaagaggccaaggtgggagcccagagaggggttaggagtgtgcaggcagaaggggccacctggaggagtgggagcaaggccttgaatgcaaagttcaatgacttgtactttagcttctgggcagtgaggaaccatacaaagttccacacagaaggtcagggtcaagtaagcgtttgcccaagctcttttcagaggtcacatggaagctagaatggaatggggtaggagacaaaaggaatgcaggcatgatatctggaggaactgtggaccagagcctttgcagatatgtcttctcttcaaccaaggagacggacagctccatgtctttattctaccaacacagcatcccctcagtggctcagcaagtgtgggacacgcactcacagcaagaaaagctgcattaaggtcttcagattctctttaacagcaggttctactggaggcaggtccttggccttcaggacagctgggagggcctcctggaagaggtcctcccgcactgcagcctccacgtgttgggcaccatgctgccaccgtgggtccgctttcaaagactcagcagccagcactgatgggctaggggaagacagagtcagcggaggggctgggcatagccaagtgtaaggcagcatgacctgctttaggggttctctgattggattttccctcctccaccatgtgtgtgatgggctaggatgtccccctccctggggacacttggaagcctcttaatatagctgcggtgaggggtttgtaaagccccattttatagatgaggacactgaggctcagaaggagaagtgactcacacagggtcccacagccagaaaagacaacatgagctgggatgtcagctcccttcccggatacaccactgcccagcgggccaccgcaccccatggcactctcatgcctcagctccgtgattgccaccaagccagccacagagatacggggcccagtaaggaaggcctggtcccgcaggaacttgtcctcgagcagctgcaggcatccgtccagctcagccaaagtggccgccaacatctcgggtggcactgactcgcccaggaacacagggattattatctggtgggccgacaggcagagagaggggtcagggtctgcccaaagcccatcctggttcccaccatcatcctatcatcaccagtccttgggatttctgctcacctctgctcacttctttccactcatagccaccagtagctctcatctcctactcaaacagggacagcctcccccttctccctgggtcctcacacaaggcaaccagtgggatccttctgtaatctcaatctgcccgtaccctctcttgcataaagccttccatggctccccactgccctcatgagaaaggcctcaacacaaagccagccttctccagtgcggtagccatcccctccccacttttcacctcacctcctactaccccccacttatcaaacgggaatgtgtgtatgaatcctccctggaatctggttacagtttatgctcccaatcagtaaggtcagagtggggcctgagcctctgcatttccaacaagctccctggtgatgctgatactcccagtccattgaccacactttggataggaagagtctacacttgctctactcaacttctctccattctgtcctcaaacacaccacgcttccttccccaccagctggagggggctctgctcccaggccccagaggtcaaggcagacacagttaaggtgtggaaacctccttattgcccgatggatcctccagagaggcggtcccttactttcagcagggcgcgtgtctacctgtttcatgctgtctcacacacagggtgccacccctgtgctgggcactgggtaagtgctctgtacatattaattaggagtactcatttcaaaaatatgtgtgcctttgataaataaaaacagtatgtgcatgttgtgttggtgtgtgcttccttgattattactgaagttaaacatgttttcatccatgtattgaccatttctctttgtccttcaatgaaacctctgctgatttccttcgctcatttttttcctgtgtcttcgtctgatgagtttctcttctttttgtttgttcgtttgtttgttttgagacagtctcgctcagtggcccggctggagtgcagtggtatgatctcagctcactgaaacctctgcctccaaggttcaagtgattctcctgtctcagcctcccgagtgtgccaccgcacccagctaatttttgtatttttagtagagacggggcttcaccgtgttgcccaggctggtctcaaactcctgacctcaactgatccgcccatctctgcctcccaaagtacagggattacaggcgtgaaccaccacaccccacctgtctgatgggtttctaagaacatcttaaaggacattacttccttctgacgtatcttttaccgagatccttcccagttttttgcttaaggttaatccattttttcctccacaaagtaaccttgtatatgtattggttttttctttgttgagttctcccactgttctgaggcttagaaagtcctttcatacccagacatcagagaaacagatcccgtgagagtaactgggattgcaggtgtgggccagcatgccctgttatcactccctttctctgagtcagcttttctctctcagtctcgtctactcctcgaactcaggaaatgtcactacaggtggccccagctcccgtttacctccccatagggagctcctctctccagttccagtttcaaaactcccaaggaagcattctggttcactcgcttgggccactggccagagggatgggatactctgaaagattcagctagagtcccgggcccagccctggaccatcactgtgccccctggtgagatgccagggctgggattcagggagaagaaaggaggttcccggacagtcattcctgcctcccgcggctgcgggctccctgcccccatcctgtgcacgaagtgggagctcccgctgtctggcagctcccgctgtctggcagcagctgctctgcaggggacagtctggacggcagaaagttcatccttaaccccagccttccagtcaaggttcccaccagtttgggacacctgcaagtgtcacatcccactgggtgaaactctaagatcccttttaggggatcccattcgctccctcccttccgccaccatgcagcgccgagaaacagagctctgaacgaaccctcagatgtccgtgcgctggggcctttccaggacggcggcgcccagtcgtttctgggtcagggcgacgcctggaactgggcagggtccctggcaccgggatcccgaaaagcagacctgcttctccctgtccagccggttccccttccccttgcagtcggccccctgcatccgcgtcctccctgccagtcgagggtccccagctccaactccaccctcccagctgtgcgttcatagcgaccgccctccctgtagggacgcacggatctggtggtggagtcttggccggcaggactggacaggaaccgaaggggcgaggcgggtccgggggtggtgcgctccaattgggtgctgtccccagggggtggggcctgatcccctatttcccggcgcgccgggatcctgccacagctgctgcccacaccgcgctcagcgccttcactgccatccccgctgtccttgccgcccccgccatgggcctagagctgtttcttgacctggtgtcccagcccagccgcgccgtctacatcttcgccaagaagaatggcatccccttagagctgcgcaccgtggatttggtcaaaggtgggcccagcccgtttccccgcgtgtccacaaacccagtgcacccccaggcccccgccctgctctgccctgagcgtctcgccgcccgcacagccccctcacctcctcctgcagcgtctgccaccagagaatgctgtggactgagtggccttgaagggatcacagcctctctgaaccttagcttgccttctgaaaaggaggataacgttaccttctgctctgtagggatggaaagaaaatactgaatggagttgacagagttcttgcgtggaatgcacgcatataaattcacaaagcccagaagacctcgggaagaaggacatactgttgtgagaattaagagatgggaagagatgagccaccccagtttgcctcccctcccctggcccaccagagtccggctagaaaacttctctttatccacctgctgcacctggccccacccaccaaaaccccccagctgccccggaatgtggcagggcagggaggcccagccagggagtgaggctgatccaggcctctagtcccagaccttgctgtttctcagggctgtggggctccgcttggggaggaggagggagggtgtagaggtgcagcgtttttactctgaagaccttttctgacttcttcctcttcagggcagcacaagagcaaggagttcttgcagatcaacagcctggggaaactgccgacgctcaaggatggtgatttcatcttgaccgaaaggtgccctccttccctcacccctcaccgcatccggagcccatgtgaccttggctctccccactggccccgggccccagtggccctcccataccccatggggcagcgagggaggggaaaggcgagggatctggccgggcgcggtggctcacgcctgtcatcccggcacttcgggaggccaaggcgggcggatcacgaggtcaggagaccgagaccatcctggctaacaccgtgaaacaccgtctctactaaaaatggaaaaaaaagttaaccgggcgtggtggcgggcgcctgta

SEQ ID NO: 145 - DNA, 79112 bp, Homo sapiens
  source 1..79112: mol_type = genomic DNA
taggctgcaacattctattaaatgtccaaattctgtgtgactctaaatatgggaaccaggcttatgatatagagacatgagtaagtttgggaaattttaaaaagaggcatgattaaacatacacaaaaattagaatatgtacagtggaattaggctaaagctttgcctaattggtgcctgaaatgtataatctgtcaagagccataatagaagagaaagagatttattttaaggttatttaaatttaaacaatattaaccttaaatctgctaaatccatgtttctttattaactggggtaatatagtgattctacttagaaacagacccacatagcatctatggcaagaaaccctcaccataagagttagcagattaagtgtgtaagttttgatcttggaattatcgtcactcacacgttgcatgattctagcacttctctttccccccagggatgccgaactctgccaattcgccctttagtggaatgagtactgggggagaaaaagtaaggtttctctttgatcatccccaatcactggcattaatcctgtttttcacacagctgggttttgtctataaagtttgatccctccttttctcatccaaatcatgtgaaccattacacatcgaaataaaagaaaggtggcagacttgcccaacgccaggctgacatgtgctgcagggttgttgttttttaattattattgttagaaacgtcacccacagtccctgttaatttgtatgtgacagccaactctgagaaggtcctatttttccacctgcagaggatccagtctcactaggctcctccttgccctcacactggagtctccgccagtgtgggtgcccactgacattcacctgtgtctagaacggaggcaaggatgctgaccccccgtggtccctgcaggaaggcccaccttgccaactctcaccaccctctcgtggccactcagaccttccaaggatctggggggatctactgaagtggtgcctcaacactggtcctggggagaccacagagggcggcacagtcactgcagaggagaaggaaactgagaaggcaagacacagtggagaggacaggagcggtgcccacaggtgtggaggcctccaaccctttctcttctggacccctctgcaagtgcccaaatcttacatttattgggaaatcaatatgctccagggggcctctttcaaacctcccagaaaacacaatgcaggggcagggcggggtgggtcgggggcggggggcgggcagctgtggcctgggtcacaatacaaagacccccagacctttcttgaagacaagacaggattcgatagggaaaaaaagcttgggatactggtgccttttgacttcaaaggcaaataataaaaagccaacagtaaatcaattagccctgagagagtgagttttcagtggacatgaaagagggagcaatgcatgtaaatgcaacctcgtgtttccagaagaaaataagagggaccacgagcctgagaacacattcgtattttttgacccagaccaaaaacttttggtcctttttaacggtacattcctacattaagaaaataattagtgataaatatattctctttttgtacaaattcaattccagtttttaacaccctaattcacaaaattcatgccaatgtatgcgctgataggctgaagccaagctgtgaaacttcagaacacagttaagggcagcaatcaagcccgttccaggctgacgcgcagggcgttcttacatcacatcccggggtgccagctcaaccccggcacgtcagcacctgggtgaagggagtgccgggcactgatgggatcaatacaagacacagaccccttccgtcgggagctggctagtctctacagtgccccacaccactgatttctatcaggctccagggcctcccatggaggagaagggctgtggcccctctgattcttggggacgtggtattcaggcaaaggcgcagttatttttcacaagcctcctctgacaagaactggacatcaatccactgccacccggggcttccaggttccactcgaagacccagagagattttaaactttctgggaagtcttgctgtcccgctgtacacctttttgggtttttctccattttaatgttttcccacggccaaagcagggtgtcggctgcagactgtgctgcaggggccggccaccaggctctccaggtgcgttttgctttttgaccttggcgatgtcggcctccatgccgcttgagtattccgaacgtaggatttcagcgaggctgtgtttactctgggtcttcttatgaaggtcaggcctgaagaacagtaacagcagagagggaaaagaaactttattatttttctttcccatttggaaagaggctgatagcagctggttctgagactgtgaagctgacatttttgtattaacagaagtacaatcccttcaatagtacttgttttgatattcgatgcaccagaagattagatacggcgctgacagattttcataacagcggcaaaatatcatggcatttttaaaagtgaggctttgttctgtgttgttttcatggggaaaaaaagaactatacaccctcatgctctgatggcaaatgaggtgtatgatacagcggtttgccaaaggacagggaaaaacccaccgtcacactcaacaacatgaagcagtgaaagctcacggcagcttcccagtaacccctaagcagcttaaagcaactggcctcctcatgggctcctgagggcttcaggactcagccctgcgggagcagagtccagcaagttccacgcagccctccagggttccacagtgaaggctgggatgacagccagatagctctttatgaacggaaaaaactcttaaacatatttctgaccctacaaaacccaaacccagggcacagcctggtcaatgtctgcatctaggattagaccagcagctttctgcagcccacacaaacccgggtgttagagggaggtctctccctaccctaagtcactcagaaaatgccaaaggttgaaaatcaatttccgatgtcgaatcctgataactgttctgaaaagatggcaattttaccatttgatcggaagatcagaggaggaaatttgtagatgttcaatcatacataagaagaatgattatgaaaactgaagagtaaaacaatgtttcttaagacaggattttaaccaaagcaacaacaataaaacaattaccaataaatccacacttccttgctggcaactccttcaataccaaaacggcaatgtcttaggatactatagtgtcatggagttctcacaaagacatatgttacgttctgctactacatttagagcattttctttgctgtaatcagagaataaactgaactgaaactgtggtcaaaataaatgtaacaatgcctttaaaacccaagaattagaaataagactaatagtgtgttgttaacctgactgtgaaagcttgtagaaacccattataaacgagctaaagcaataatacctgtttctaatcacactccagaggacagggtgacagtcatacaatggtgttttctattgcaacatacaggaagacacattcaagccaacctctgcaggaaaagaagatctgaaacaaggggacaatgaacagataacatttaaaggccaggagtttatggggtgagcacatcagggcaggatgtagtgagaagattagaagtatacagggaagacttcctggggtctgtgggaaatgattcacatacacaatctcttacaatcctcgctcaacaaggtgggtacggttattatcctcatttacagacaaggacacaaagactcaaggagggtaacctgccccaggaccacatggctggtaagtggagaagccaagaggcaaactcagggcagagaacgatttgccgggtcagcgggggcaggactcagctggaccaagggtggaaaatggtgagatgtgatgggaggggtcctctgtggtctcctaaggactacttcagcaggacagtggggcaggagccaggcaagtgagtagggagtggtgaggggagacagcagagctgcagggtggaggagggagaagccagggttggaacttgactatcactcatcagctgaggacacagaatgagtgactcaggctctgtgcctcagtttcctcactgagaatggcactcaggtgtgaggattagaaaaaatcaagacatataagggggtagctggtggttggcatgtggatcgcagtcacagttaaacattaggaaactgaggtctggagatgccacgcacctcccccagagccacacaggagccaggactggtgctacggcccctgacagctgggctggggctcttctgagagcatccaccacttccctaagagcagcgagtctcatcatgggtcacccgcccagtgcggaccatgtgcaccagtgtccctggaggaggtccaagctgctgggggctgacctgtggttgggaagtggcgggagacagggcctgcggttgggcgcactcaacttgttccaaactgaaggctgccagttcctgtgcctgtagtttatttttagtcaggttatgtgacagagtgaaaagggtctgacaggaaggaatgctttttcttccctcttgtttgaagccaggttcacaatgtgtataattttaaatgtaacaacctaagtttcaaaatatgcaaaatttcagtcaaaatatgctccccagcataagctccagcacttcaacgatggctcctgctaccgctaaggcaaaataaagaaccagcatcttactggagtgactgatacactaattgcctacagaagcggtgcgggctgcgggagcatcttccaggcaccagcgctcaggcagtgcgcccgtgctcccaggctgccatccacccaacagagcagaagcccacacccacaaatgcagcctacacaacaggcagacacccagacaccaccggggccacttctacagctcctccagacctgtcccttcacaaacaccgtgggtctggggtggaggaaggcaaccactggtgcgtacattgcgccactgaataggaacaggagggcccacgtggtggaagaggacgccgttcgaaagcaccttttggagatgggtcctacgtgccttcagttatcatcaccacctttcctggctatttcatcatgttagtcaatgtccttttgacctgggatgcaaagccagcagtccactcactcagaggttccggtggtcagcaagcaggcagagggtggcattttctagcccagacctcttccttaggtgggagaagctcaggccaaccctgcaggggtttcacctgctgtcatgacagccacctcaacaaaacccattcatcccttggccagctccctgtctccttttcctttgttccaaggcccaatgctgaaaaggcgaagtacagatgggaagatgaaatgctctaaacccaagcatgcgatgggcactcaatttctccttctgccaagctgcagtgctcccaggaacctgccaactttctcgccctccttgccctccaaatacccgcacccctctccaatggccttcctgagcatccaccatagtaatcctgtagttaccaagcaacagatcagtttatctaaccacagggaactcccttgtagtgaaggctgaataaaccccccctcagttaccaggctggattactcagcaagacaggcagatgccacttgcaccaccaataaggtgaaatcacagcctaattagtaaatcaatataccccgttacaatgaccactggagaagagagatcgcagggccttctcccaactttatcattacattctcacaatgatcttcctaggtaaaaacccattctaattcaggcttttgctaatggcactcttttataggacagaagtttaaattttatttatgtaccgttaaggctatcaatagtttcttccatgttttatggctttagggtcatgtttgggaaagtcttcattctaggatttcaaaaatattaaagtatattttcatctagcttgctactgctttaattccatctaagttttattttgattaatagaaaaatgaactgtttcttcctaagagttatccagttatccacaacggtcactgaacagtaactcttttccccaaggtcttgaaacgctcctctagagcacttcctgcaggctctgtgtgaaaagcagtgatgaccacaatggcgcccttcatgggctctacaaatagatgaaaacattgaagcgaataccaattacatgggttgttaatggatttaaatgtaaaacaggtaaaatcaaagccatccaaaccgactacatgacataggcatttaacttactcacttttccaaccaccgcctgaaacaggtactactagtatccccacttcctggtaaggaaactgaggcacagagagattaggtcatttgtccagggccaaaaatcagtaatgcaagagctggaatttgaactcaggaaatctgacttcacagagtttaaccatagcagtctgtcaccatgctacagttttcaaaacaaggggcaagttcctggcataaaatgtttttaatatacataaatctgtatgcctgtatgtatacgtgcaaagtctgaaggatataggaaatgtatcagggttaacctgaatgtaggcttatggttaatttttgagcttttccctatgtcctgtagttttacaatgagcatgcattatttttataattagaaaataacagtatattcactctaaggggaaacaaaagcaaatggtagaattttgtcctatagtgaaatgccagagtattttaatttctactcatcagaaacctgtctgccttttggctttgagttggtttgattttgcgagggtgtagtacaattaaaacatagacagacagacagacaggggttcttcagaatgaggactagtcaagtgcactcctctaatctgaacgaggctgcttataagcacatgttccagggccacggctaggccctgaaggtctctgctgacgacgcaagtcccccacatgggaagaaaagcctgggctctcagtgaacgcaggagaccgtgaggacttcaggtggcccgggactgactataagtctctacacttgtgcctgactctatggaggacaaaaaggcagcaatgtctgggtagggttttggtggctctcaggtcacagtgagggtaacaggcaactccaggggaatgtgacaagcgggccctccgtatgcttgtacacagaggagctgagggaaagaataagctggtgtgggatgtcatgacaacttgaccttggcatgggccaacccaaggaggatgctaccctaccttttatggtcagtgaggaaaaggaactgtatctagactctttcaacctctgggttctgttctggtagagaagtatgctggcagaccagctgttttagggatgccttctttgtgatttcttaggatccaatcaagtctagcttttgtaaaactaccagagccccagaagacactcggctccagttgagtcctgctgtggcagtgggaatcatgggaatcacagcagcattcctaggaggggttctgtggacacagaggctggtgaaaagtggacttcagctttgtgccaaagatcaagatctagtgaagctcagaactccgagccctgggccaaggacaggcacagtggcaggcagcacagaccacaactgagaaaaaccgcggatggcccggcacacttgctgcctggaaggccatgcacatgatgggaaagaggagagatcatatttagatatggccgatgtttgaaaatgaagggcttcaccagagccccagaaatggatgggaactttgagactatttagcccaggtgaccaaaactcttaggaagttctgtcagaacataagcaggaacttcagatggcaggtggcagtgctggggacgggcagaggaccagaatttgatgaccttggttggaatcccagttctgccactcgcctagctgatgaccttgtagagtcacagcagctttctccaagcttcgtttcccggtacatcagaaaggacctatgcacaggcacatggccagtatgaaggtaaaacagcctacagtgcgttagagagctcggtacattttaattctgtgaaagccttatgaattactgttaagatggagaatacagggtgaacatggcagcagtgagttgtgcttggaactgttatgattacacactgaaaatactgactgagaaggaccagcttgaggcagaatcccagccccacaccccagagcgcagccctctgggcctgtcctgtttgacactgtgggtgaactggatgaaatcatgaggcatgtctaccacatctgcaggaacagctaatacactggctgacaaaataacaacagtctaggagaccaaagggatgggcctacgctggcaaggtgagcttgaactgggacagatgtcaggtcttgctgttagaaggtagggtggcataactgtcacatatgcaaatggacagggattcagttggcaagtttcaacctgaaaccagaggtctgggttcgaatcgcggctctgcccagtggacagtggtgccatcatgggcagtttcctcctctgtaaaacagggataacatcatgattgaagtgaggaccacaatggccatccatcatgggggccagtgcctggccactgctgagcatccatcagtggagccgccatccctgccattatcatcccctgcactaacagacgtgattgccccatacttcttgctgggcagtttccattgtaagtctggatactttcacgaaccagactttgaaaagaacctgggcagataggatgggtggagccgagccatccagaggacaggctgcaacagtacagaccaaaatgcagctgggccttcgtacagcctgagacaggcacaccagaaacaagcccctctgagcaggggtcctggcacaacctcatacaggctgtagaactgattctggaagttcggccaaggtacttatttctctaagtcccacgttattcacttacaacgattaatgagctaacactctattcagcacacagcctgttaggaaagtactcagtaaatgctgactagtgttattattaacagcacgaaaaagagaaaaggggaggagacaggagtcatcctcagatatgtggcatattgtcatgtgaactaaggcctggtctgatcaataacatcacttctatgtttgcaaatcatgtacacacagcgtttgaatctcacagaggccaaacaatggaaataagaccaaagggtggaaaatgaaagtagtgaattctggctcattctcagaagctctaatggcaagccaggtccatgaatggacagccctgggggctgcaaggcactgggacgccaggggtgctgaagcacaggccacagcaaccatgggaagtgcagtgggacccacaggaccaggttgggccaggctgggcagactcagggaagactctatgtagtttccatcttttatttacagatcaaagagaggaagtgagacagggcagacagctgtttatcaaacacccactctgagatcagcactgagctaaggctgcacattccttacccttccccacaccctacacaacaaccctacagcacctccattttacagctaagctgctgagttggaatcaaactcaggaatgttggcttcaaaacccacgctcctagcactgtaccgttctgcttccagacctagaggaaactggaaaaaaagttagatccaaatcttgcttataatcatctcttctcaaagttgttccaatgatttccccaaagaatagaaaacatctacgacccactcttggaagtttggccaaggtactcatctctctaagtcccagtttattcacttacaaaagctaatgtactaaaagcattcacatgctgcccattacgaagatactctgacagtttcaaaccaaattcttccacacacactaccaaaacatctcctactttaaggccatttctttggttacacgagtagttatctccttgtgttcatatacttgctatttcacccaatacagattctagaaaccagcagcttccagacggggcaggcgagaaagcggacacggcccttggctgagagtttgggcttcaggatctctaagactcagaatcacatgaccgggctccgagttctacactggccactgcggatcctgccttggtcacagggactggatgaggcctcagtgagataatgtgcatggaggactcagctcagcagagaacacacgtaagccctcaaaagagatgctgctgccaccgccacgagcacttaaaactgacatgcacaaagtgtcacatgctgtcgctctgggatgctggttctcaactgtatccctcattttgactattaagtagttaacaaattactctgcattttggaccgtagctataacattgggaccaacgtggagatatctgaaaaagacttgaagtcatttcgtacaggttataacaagatggaaaggctctgacatcatgaagaagagtgtggaggggtccgggatacacaccttcctgttgcagaaagcaacttaatgaaagtagagttagattagaagaggagaggaggtagtcggctgtaatacaggaggggtttgggatgactaaaactatcctgcgtgcagaaggggagacctgggggactgtcatgttctttcttgatctctcaaatgatatgaactagaagagctctgagcaaggacgagctaatgaagagctggtactctcctgttgcacacggccgcatctggacctagcggtttgtgctaggccagccacatctactaattccagtgcttgggcagctccagcagtgaatgtgcccgtctccagcatcgtcccgggagaggctggctgggttcctgttctttgttgtcagccctgactgcatgactgaaagcacgccctgtggttcccgctgtctgcaggtgacccaggtgtggaggaagctcagggtcactgtgaaatcctctaatcgcctcattagcagggtggggaggagggtgcgtttgttccacgaggaagcagaaagctggtaattgcatggtgtcacatagaaaaaaaccatggtggaagcaaaaggccaaatgtaaaaagctgtgtgtgcacagctgtaattaaaccagagcccgaaaagcaaggcccacagcacctgaccgtagaaggaaggtaaagcagtggaaactggttttgcatggggtgtgctgagaggggaagggcagaacccccactggagcatgtgcccacactgtgcaacccatttggagttgcctgtgaacatgaggtgcatgaactctataacagatggattcatttgacaaatggtccctgagactacaggccagtgttccccactcagaagaaacgcagtcaccttccacagtagtgctccgatctcttgctccaggctggacaagagtttattcttaagagaaatgccctaaagacacgatccagcatggaccccagaggtgccagcctgcctcccctgacagaggccatgagagcatgttcttggctatcatctgtgcagctggcccaggttctacataaaaaactactgattaatcctaacttatctttaaactacggatatattcagcagcaccttgctgccctgccatgtgaagaagagcatctcatcatctgctctgaggaccacattctttcaagttcccagggactgtccctgggtcaagttcacggtcacttctatctcactcttcataattttagattttactgaaacacggtctcctgggttggagcctgggcagagcattttcatacgattccccagcagacttccagagcacattctgtttccccatatactgccacatctgtcctcgtggctacttctggtggtcctaactgttttgctctggtcttccagcaaggcctagcaacctctctctgcctgggtgcctgctctggccttgtctaggtggggtggaggccccactcctgagcctgctcatttctgtgttctgtgggctgatcccaggcctccttcaccagggaacagaaccagcggctggaccacgaggggcatggggaatgctgtccttcctgaggatgcctttatgtggggaaggagatcccaaccccaggcctgttctcttaggacagaatgactgacaagcagcccctagagttctgaaagacgactttcccaccaggcagggtttgctgttttccaaattcactacacaataaaaagggatttacctccttttcaagtcagaacaattccttcttcctttcttttcctttgtgcacttcctctcagaattataggacattttggtttctactcatctattacaaaaaatttaccgagcacctactgcgtgccaggttctgtgacaggtgctgggcattcgggttgagcatctcaaatctgaaaactaatatgctccaaaacccaaagctttctgagcaccagcatgatgcatgatatgtggcactaaaaggaaatgctcactgcagcactgcagagttcagggtttgggtgctcaaaaaacctgtacaacgcaaacaccacaaaacctgaaaacactgaaacctgacacacttgtggtccccaagcattctggatgagaaatacgcaacctgcacgatgagcaaacaccaggcaggggctgttctctaagctatactttcgaggaggggcagacgctgaccacacatacaaataccacaagcagatgcaaagctgccaccacaacagaccagggccagggcagagacgtgagggtgtctgcctggctggagagggcacagcatggaggggagaggtccaggcccaggacatgttcaggcaaaggccctgaggaaaggataagaaacaggggtgtgggatgaggctgaacaatcagcaaaggctgggggcctttgtgaggaggggggtttgttgtggcttgctctaatcacagcctaacgggatgccactgaaaggcgctaagccagggcaagatgcggtgagggctgtggaggtgctagctgactgcggtgccgtggccacaggaagactcggtgggagactgtttcagaggttcggatggagcgccggggctgagggctgctattcataaagacagcgtttgggaagcggagggaagagacagatttaaggaggccggagggatcaacagtgttggatgcggctgagatggagtagataagcactgactcaggtgcagtggatttacacggagaaatcctcatgtctccaagtgtggtttcgtccagcctctcatctcatgtttggccaatctgtctttttacagaatgctaactggctcaatgaaatcgagaaagttttcacagtgggcaagattccaggtttgccttcagctaattaagtgatattagggaggttgtaaatgccacataaaaattggcaggcaagctgctctaatgatgagaatattgctttacagggagatgcagctgcagcttcttaatgctcgtctttgagggactcggttccatgtttccaaggttgttcctgataagaaaagttcaagggtgctaaaaggttgaagttcacttttcgtactctcggttccgcgggtactcgcgacaatgatggaggctgggggaagaagcaatgcgacaatatggtcgttgtgatgatcaccagatgctcccgcttattcccgtgccggacaccacgatgtttccactcatgatctggcttaacccccacaatcaaagggcgacttgagtacctccctttgaggccagaggacccaggcacagagacgctgagtgacttgtccagaggcacacagactgtaagtggcccggccaggattcaatcctggtgtctgtgtgattcaatcccagatgtaatcactgtgattctcccagagtcggcatgtaagaaaccagagaggggcaagggagagggctaacgggggtacagactcctcaagctagagctctattctgcacagttagctcttcccaggtattaaacaattgctgaatgagcaagggtgagaaccagagaacaacacagcacaggccttcaaagatgaaaaccaccccagagctttgcaaaatttccaattggaagcatttctgataattcagacaggaaaaatctatgaacctgtcctatctatgaagaaggggcgactggtgtgtatgatttccacgaggatgtttattttagaaagtaaatgacttctagaacttcagaagtgtgggaggttaaggaaatcctctgcaaggcctggcacacaagccacagggtgcgctggttctggtcccacttcccctcttcctactgatcagtgcctgctgagcactgacttagcatgcccagatctactaggtactaaggggtaagagagccccagcttagactccatgccttatttgataaaatcaggagctaccagctaacatttgggctaggctgacttgagaaaatttatacaaataaaacttttctttccaacaattcagattgctgtttagtaattttaaagaggaagctaggagcaacagggggacaaaattattgcattactgataatgaagatgtcccagatgtttctaagctctaagaacaacactagaaaggcaggtggcagaagtcaggggtaaaaccagtcttaggtactataaactgaatcgtctgggcaaaaactactgtgtgagcacagcatataattcacataaaatagggtggtttagaaacagcagacttgctctttcgtactgtcacagtaccaagatctttaaacatttttaaattttatttttattttttagagatggtgtctcactctgtcacccacgctggagaacagtggtacagtgatcatagtttgctgcagccttgacctcctgggcttggcctcccaaagcactgggattataggtgtgagccactgtgcccagcctaacactaagaacttaaggcacatcgtttctatattattgagccattttccacagagtggcagcgaaatgagagagaatcgtggccctattgagcgtgcctgctcactgttctgacacgttctacttgtgtgacgacctagacagatagacacctggcaaacaacacaattctgcctctcccagcagacagtgctgggtctcagcatctcctggaaagatggggactttggaaggatatgttacctttgcttctcagaaactgctgaatctactatagcttcaaaataagaactgcatttcacggaagggaaaatgctgttttcgtgatggatgttgctaaggggccattcaatattttaccgacagcaccaactatctgtgtatatgtctatgtcggtgtttggggtgggggctgttttgacaggtttgcgtgtaggtgtcagaagagtttttgtgactatgactgtatttctatgtgtaggggaagatatttactgttcccttgcagaactgagcactggaaaagtcgacagaaacctagttattaagatctcatttggggccacgaactatttatttttcttttctgaaaagtggtcgagtgaaggactaaaggcaatgtaagagacgaagggtccctctcccatcgcatggaccagccgaacagcctcctcactaacctgctcccgatccccattctaatacccgcctgagctcccgcttggcatatgacaggtgagacaggcttctgttagtctgatggatttggtttgcagatatcacaggtttgcacataatatataattattctaggcagtaaacaccgtaaaatggaatgcagaatagtttagagaatttagtgccattattttattcacccatacaaaacataaggaacccattctctttcttgacagacggatttcagaggagacgtttcagctcagaacagtaattgtgaccacagcataactcaagcactttgtggggtttaatggacttttctttccagtcctcaaaaagcagcaactggcatttgctcaaaccctgactgaggtgtggaaaatctgtcaagttttctctgccgcttaccctgaccacaattatacggtccatgtgcagattagctgcaaagtcattcctcctccaggagtgacaagatttccccaaataaaaaaaggtaactactgtatcctcgagtgcccgtctgccttcgaaaggcaggggtggggggaggatctaaggagtgtgaagagaaatgccttcaaaagaagggcatagcaacggaaaaagtagctgtaacagagtggggacatggcaagaacagagagcggcattgtcacgggcggagtaatcctgtgacacactgctgtcactcaccacccggctccctgccgcgccagccagacatcaaaggctgccccataccatcttacatgctctttatcagctaatcagcccattcttccctaaataaagccctgttaaatcccctgctcacaggggtatcgtggtcttggtgcccatctgctagcgagggtcagctggggcaggaggcggcaggctgctctctccctagcggcttctcaaggtaaggacaatgctgcctccaattcccccgcccacaggcctccctctctgctttccaagatctgggccggtctgaggagctgctatctggattaacacttgctaatgaaatctccagtcataaagggagatcatctgctaactatgaaatcttgggattgcatttattttcagggatcggaataaacaaagatgtgtgtttcttttttttttcttctttgagacagcgtctcactctgtcgcccaggctggagtgcagtggcgcgatctcggctcaccgcaacctctgccgcccaggttcaagcgattctcctgcctcagcctcccaagtagctggaattacaggcgcctgtcaccacgcctggctgatttttgtagttttggtagagatggggtttcaccatcttggccaggctggtcttgaactcctgaccttgtgatccacccgcctcggcctcccaaagtgctaggattataagagtgagtcaccgcgcctggccacatgtgtgtttcttaacagtaatcatttggcagatctcttcctctgctctcaaagtgtcaccattgccgagatggtaacaaaatgatcaggcttctgatgatgaggctactcttagtcatcagctgggaagcctcatggtttcattccgcactcaaatcaaagttaacatgcatgagtactggggagagcagatcctaagacaggatctgggaacccagttcccaggccccgcagcctagaatcctggcacagccaagagggcctgggagtagagctgaggcatcatggccctctgggaggacagcctggctcgagcagaggatgagcagaaacatctttgggctgcagccctgctctgcactcctgaacctcaaaatggcctagaaggaaccagcaaaggacacgtccacactcatctaggcactgcagtagagcagcacatagaaacagtttctgtttgtttttcctcaaagaattactggagcattgtcctatgtgagagttattagtatcagaaaagaatcaagcatcttaaaaattccaaaactgggaagagaattaggcaacactgtatccattccaatgagacttggaggtgccaagtcccccagagaggtcaagttggatgtccccgaatctgctttttagcttgtaagaaccttcatctgcagggccctatatggttcaaaaagcatattcacaagtcacctcatctttttttttttctgtagagacagggtctcgctatgttgcccaggctagtctctaactcctggcctcaagcaatctgcctgcctgggcctcccaaggtgctgggattacaggaatcacctgattttgattctcaagacaatctcgtgaagtaactaaaaatatggattttcctccccctagtgtagttgagatcgaggctcggagacgttaagaaaagggaaggccccaaactcacatcagaacggagccgacttcaatccaacttccctgactgcaagaccaatggtcacttccctccactgggtggtccctctgtctttgccgtgacaggctagagaaacggggccctgacaagactgatggaataactgacacttcccggtgaacggagaagccagacatcgtgtgggaacaggaagcacagagtggtccttcccggtgaacaggcaagctggacactgggcaggaacaggcagctcagagtggttctgcctgcagattcccagagtcagtgggggagcctgcggcgtttgtaaattaacgtggaaaagggaggataaacaatgcaaactaaccatccacaacgttctgggattgaacccagaaatcaggacaggtgagaaaaaaagtctctgtgccccaaacatttgttcaacggaccgttcccacataaacaatgagaccatccgccccaaagttctgacatgagtggctcacagggcctcacgcgctctggctcctgtgagggctgaggctggtactaaaagaacgtctttgaggagaggaagaaggccttttacaaatgtagcatgctgagggaaatcatctcagcactgggaaaacagactcagagcccagcctcgaacagggcaatacccctccctctccttcctctccccaggacctctggacaagtcctgaacatgctctttttgggaggaaagggctctttttgggaggaaaggggaagggctcaccgctcttgccttgatgagcgctcaccactggaggtgcaactcagcagcaaggagcccagcactgaccccaaagccagcctgttagagatctgggcttcagcagctcctggaatctgaggctgggcactcagcccttccatctcactggaacaaggtatgctcccaggcctcgtcacacagaacacaccagaatgtgtcatacacatctcggatgctttccagggcggaccgcagcacaactgaagctccgactacgtttgggccctatgaaccccaccacatttgggcccaaaaggaggcacccctgaatttctgcaagatgaggtggctttcttctcattccaagtgcttgtttattgggagaagggcaggtatgagtgagaagagagttgcggtgagcatggcagctagcacatcacatcatgtgaacggagctctctagccccgtcacgggacgaattcagctcatcttaccttttcacgtgtgctttcctcttctttctagtcaaggcactaagattcctgggggcatctcttagtccgaagctcttcgccacatgcccaaggtggagggatcggacgtggaagatgtgcttcagctccctggggtaggtggcgtaggcttggatgaaggactgcagagctgaaagaaaagagagcggggagggaagctgtcaggaccggggtctccaagctccaaagtgcccggcctaatggttatcttctgtactttatcttgccaggcaacgaaacatgagcaggacaattacaacatatacaaacaactaaaatctagacttctgtgtatttcttcaattcctaaacaacaaaaagaaaaaaactacagggggccacaattattacttgaatatgcccgataaaatatcagatttgaccacacagctcctaacaatcccacagggtggggcccagcacagcacctggtaccagcaggcactcggtagatgtctgttgtgtaaatgagtgaaaagagagaataggtgaagaaactaagaaatgatcaacacaggacatcgttttcttatgaaaatgagaaaatcattagacatttatattaacacatttttcctaattaaattttacttacttttgaatagttaatgcatgctagtctgttacaaaatttacaaagttcaaaaggctgtcttatgactgtcatgtttactatgaatgaatgacattaccaccaatgcccccttcaccacaagccccacctccagctcccttatccataggcaatccctgataccagttttttgtgtactcactggactttttaaatttaaaattttttaaagagatggggtctcactatgttgtccagactagagtgcagtgacgtgatcatacctcactgtagcctcaagctcctgggttcaagtaatccttgtgcctcagactacaggctaatttttaaatttttatttttgtagagacagggtttcactatgttgcccaggctggtcttgaactcctgacctcaggtggtcctcccgcctcagcctctcaaagtgcttgggaatacaagtgtgagcaacctcacccagccttcctcatgggattttaaaaccaagttcattctaaaagtatccaggattaaccaatacagagcttcttgctcaaagaatgtgtaaaaaagggaatgaaacaaatgtttaaaggagaaagaaaactactaagtctctaaaatagtcccttgaggactgacaacaatttagggacattcatcaaacactacgtcaggaaagtttcagtgccgttttaaaattaagaagagcggccgggcgcggtggctcaagcctgtaatcccagcactttgggaggccaagtcggggggatcacctgaggtcaggagtttgagaccagactggccaacatggtgaaaccctgtctctactaaaaatgcaaaaattagccggatgtggtggcaggtgcctgtaatcccggctactcaggaggctgaggcaggagaatcacttgaacctggaaggctgaggatggagttagcagagatggtgccaccgcactccagcctgggcaacaagagcaaaactctgtctcaaggaaaactaaattaaattaaattcagaaaagggggtccttgttgtaggtccctcctccctgagaaaaaggccagactcattcccaggagggtggagctttggtctacttaactaggcattcccttgaggaaagattctcgtagattgaatatctggaagtaacaatgaaaatcaagtgtccacccgcttctcactccaacaaggaaggagggggacatcctgcaaacactccccgccatccctgtcactgctctcttcacctccaatcctgctcttctgccagctgagccagagcccagccgatggtgtctgatggaggcaagcactgaatgccagccttcgcttcctcactctccttgttgagccactggactggcaagtttgcccacagcttaaacataatatcccagcagcacctggagattggcgtttatgaacagtaataaaaagtgtcattttagcagatcagctcctggaaggatcctggggaatccatcaaagctctatttactgagtaaagtgaactccttttcccaatcgatgagcaataataaccaaggcaactcctctgtaccctactcttaaatctgtgcttactcccctttttaataactagggactttttcaaagaaaatctttaacgcttcaaatggtctgtactgtttggagtacacagagccccactagatacagagccccacagccaagccctcagagggaaaggctctactgctacgcgacccaggagattcaagcctcttctcctcaacctttctttccccaacccccaacactcactctggtctcaaaaaagacaagaccgaaaccaagtcaagccgaaaccatgccaagagcctgcacttttaaaatctcagttacccaaatcccgctctaggtctcttcatttcctacctctcttctgtgtatgcagatgagtccctgggcttccaccctggtcacctctcttcctctcctcctctccaccaatcctatgagctgagcactgagagcatctgtcccaggagatgtaggtgcccagctaacagctttacagggataatgagtttgccaagatgtggcaggaagtgttttctccccagacaactggccaggcagcatttcacactgcatatttttactaaacctccttgtcctcaaggctcctgtctcaccggggacagcgacagttggttgttctcacatacttgcatggactcccatgtttggataattcagagaagcaggaatttcaaagacgctgcagtagctgtctgcagaacctttcaaggagcaggaagtgctcatgttggcagcgtcgagaatgtgcagaaggaacaggggctgtgggacccacacaagcggaaggtggagaagtaatgaaagcagacatttatttggggtgacggatgaagctacaggccaccagagttcagcactttgcagtcactgattcctatttcttgccaactacttaaggtgcctgaattagggcaaatctattttcaagtatctcacatggacacatcgtcctttttcattcctggacatttggatcagaaactagtggtatcttatgatgacttgtaagatgaaggagacagaaataaacaaacctccagcctggaaggtgaagatcatctctgctcctcccaaccccacctccactcccacaagagcacccttcagtacagaataaaggcacacgcatcttcaagaccacccaacacctacagcgacaactacggaaaggatggaggaaaaggaggttccctgctgttctcttcaagacaaagcatttggtaaagtgcccagcctagctctgaccccactgaggggagaagaatgacttgtcatcactggtgtgggttttctagactttgagaagcatcccttccaaacaggcataaatcctacatggagttcctggtctgcaggaagacctgaagatggagaggattaagccacagaagcaatggtcatttgcaggcagaggactctagcttccaagatttttgttcgggaatctggaattcaaacttatgttaccactcgttttacaacttgaatccctagctaaatgatgcaagaaaacagaggaaaaaaggggtaactgcttctggaaactgacagttaaatgctggttattaacaatgactgggtccaaaaatgcaaaaggaaaacaaatacatacttggcccagtttctaactagttttctgccatcaaggcaaaagccagctgctttgttaattattcaggaggtgggttctgaaatggcataaaagggaagcaagtcaatagtggggaatttgcatatgcagattgaaatgcaaaagagtgtctccacctatggggtgcagtggctgttcctatgcagtaaattcaatacatttagggtggcaaatacgtgtatactctctcaagcctccaaaactcagtcctaagaaacaggagagaaggaatggtggcgagacttatgtctgaaatggggtgactgagctctgtaagaggcggtgttgtcccagcccattatcaatctggtgtggaaattgattagcaaataagagacatgatacgtttatttccttcatggtacataaacattgggaagtgaccctgttccaatattccttaaacaaaagacaagtgaccctgcttgtttcatggtattaacaagttcaatggtaataacagtgaaagaaaacccaaaaccacatcctttaagaattactgtaacttccactcagatgaccgagacaccttgaaatagttgtagtcttgccaaaatatctgaggcatcactgacaccaaaatcgaaggtgacagtgtgggtttgatttatttctttccactgcaactttgataccagccctggaattcagcagcacaacaccttgttatgtactgcacagccagctgaatttgcctaactttcatcaaaggtccaaactgtaaagttacactgtgacaaagaccctattcctcttgagagacacagagcaatactcctctagaggtagcaaggtaggaaaacccttgggaattgttgaattccctttagggaaatgccaagacaggatattattagagaaaagtctagaaggatatacaatggcaattacggggacttcatcttttaccttgtgtggttctgatttttaacgacaaccaagaattgcaattataatgtgctaaaggtatgtaacaggtccttgacaatatttgctgactaacccattttttcatctatattttctggtgaccacaattgctcctcagccaggctcccagctttcacacttgcccccgctagagtctattctcacacagcagccaggtgatctctttcaaacctaagtcagatcccacacttctgctcccccttcattccgaccaagacccaaagtcctacgtgattctgccttggccagcaccccctttccacccacactgccttcctcgagctcgtctgcaccagctcccactgcccagaatgcccttcctttagagagccacggggctcatcccacttcaggtttttgctcaagtatcacctacacaatgaggctcactctgaccccattaaaaatgcactctgctatgtcaccccttcacctcccccatctccttctacttattccatagctcttgtcacctttaaatggactaatctgttatgtttattatgttcactgtctgctgcccctgcaccccactaacatgttggcttcacaaagcaaggatttttgttttgatctcgcatgcattccaagcactcagaatagtgcccgatttgataaatatttgtcaaatgaatggtttttaaagcatttctatttataaaaagaaaggatgctacagtgttccgatattggtaagccagcctggcactcttctcaaaatagcaggcaactaacaaaaaaaccctgtgcatactccagcatggagtaagtctcattagacatggtcagtctctggccaagacatcccatgataaaaagtaccagtgattacaaacccccttcagccatacactgcttattactcaacgtgaactgtgaagtctacatctaatgtatggtgatcccaggagccaacttatccaacaaagggtctgaatattaagtcaacacctctctctttcataaatttcctaggaattgggttcatggtctatggctcttcctcagtactgttctttctcgtttttctttgtgccttcaaataggaactgcttaggtctaatatttccagctctggccttcatctctaatttccatctctacaactatttctactaacgtgtcacatgtcttctatctggttttcaaagaaagaggaaaacagatccttaagatccaagttgttgggtcaaaactctagtcccgatataagccaagataaagcctcatttgtgcaaaacatggggaaggatgaaattaacatttaatatcactttaaagccttccgtgcctgcttccaaaccctgcagaattatggagattgaaggctttggctggtgagcagggacctccatgttggcctctcaaccggtttgggggtatgtgggtgaaggtgggggagagcactctgctgggctatccactgcgcaagcacctaggaaatcgactgacctttctttgcccaggagaccctcctctcactggagtgcacgtaatcttcaaataccgtctgcaagactgtggctcgctctcggatttcctgggggccaacagcatgggatttctgagagggcgacggaaggattaaaggagagatagagtcaaggtcaggaataatgaagcagtttataatagatttaataacagtaaaatcacacagtaaccacctagggccaacaagggtaatcctttcaatattactaggaaaaaagggagctatagagatgtcaaagtcaagtaaggatgagggtggctttatgagagagaacatcaggtctgtttacttatttacttacttttcttcctgacctcttaccatgcatgttcaaaatcaaagaccattggagacactttggaattttccaagtccaattcagacatttaaaacatcactgaacatgagctgttttcaaatgggtcttggatctcctaggaatcttcacctttccctcacgcgcatcagtggaacaccgacaatttctcttcatgagcactccacagtgacctgcctaacattctgcttttaaaagttaccccatccttgaatttcagagcaggcttcctcagtgcctagagcggttcagacttctagtgtttcaaatttattcctccagcccatggccactgtggccaggaacctattaaggagtgagtgggctgttccaggacaacacactcaaagactgcctggatctttgcagcaaatcgtccctgtgtaagaagtagcatctgtgtgcatgcaaagagcctacagatggaaaatgttaataaaatagacaattattttcttttcatcctttaacagtaccagagaaaaaaatttcctttttaaatatccccgctaaaaactagtggcttttgtctccaatatcgtaaaacaaacatgagtgctttctactgaatgtgaaatcaagagaacacagattcttccacccaatgaggccaacctgccaagtgacactgatcacttgagtggtgctagtgcctctacttccacctgccaccctggtgtgaacccccggggaaaatccagagtgagaccgggtcgtgctgcttaaccttgtagaggacggtgtatgagcgcctgcatctggcctcactaagactccctgagcctctctttcacctttaaggctgacagaggaagaacaaaggggaggaaagaaaaagcctcattctctggatcgacgttcatctctatattaagagacttaacaacgtgaaaatgtttttagtttagtcaaatcattcctgctacctgtttggttgatgacagtctcgctgatttcacagttcaatacaaggtccccctaagggttctatccgctaaaatgtcaggagaagagtcactcaggagccgtgttaccaaagtggacatttgctattgtcattaacaaggatttttttttttttaccctcttaactgatgtgaaatgcaaacttttttttgctgccctcctttcgttaagccacctcagcagcgcaactgtcaccttccctgtgtttttttttttttttaatatgaatgtgaaattagcgaggatgccctttcccctggcggacagaatcctctgttattaaaaagtaaagcactttaataatgaaaactttttcctctttttcttgtgttttaactgtttaaaattaatgagaagggcagaatggttgtcaaagcaatattgaaagccgggcagccaggaccgaataagcacaaaaatccctctagagtgttaaataaacagagctccagccctctccgaatccctctgttggttattgtatacattctgtaacagctctcagaatagatctgagagccagggaggcagagaggtttcagaattccaataaaggcctcaaattaaagacagcctggtgcgaattccaggagaaaattaaagagacctcaagcttaagtgacaggtgacttgcttctgtgtcacaactgtcaggggatttagtgataatatggcaatatattacaaagggcttttcttattcccccctttaggtttcaaaatgaggcatcttttcttcccaaccaaaaaaaaaaaaaattacatatatataatgtgagtgtgtatacaagcgaaatacgtagggaaaaaaaaaacaggatagaactaggttcacaggtttgaaatgataaggtcagttttagtaaaatataagaaaaagttaatggcagaaaaaaatatatacaatacttaggaaaaaaaaaatcttactcctccctaacccctgcttccagaaataccttattttaaaattgcccctcttgagaatgaatgaggtatttttcagttgtcttctggggaggacagtctaaatttaaactgaagacagaggggggcagagttatgcagcaccatctcagcccccgacaggtaaaatgctcctataatgagagcgggtcaaacccctgagggcacatggatacctggcagggctggctctcccaccctccaagacacagagtcagtactggttaatgaagctaacttcaactagtggaccatgggtagtttagaaaaacacatttccaaccatccatccgcacgcaatgcacctttgtctctaacatcctactgatcttggaaaacacaggccatcagaaaggatgagcagggggctctgaacttattttaagatctcgcaatgccagcaacggctcctttgttgggataagtttacaggtatatttcacaggacaaaaacgcttgtaggaaaaacatggttgggtgtgtgtatactttgatgatgaagatttcacacctatcaagaagcaacagatgagtctaagataaataggctggactatttttattataaaaagtaatagcaaaggtgggaggtttttgtgaaagcctgcaccttgatattgccaacttccaaggtatttttaagcaaaatggaagggttttgttttaatcactttattgccaagctgagttttacccccatggtccctagaaccttctgagtgcttcccagtaaagttgaaagatcaaatttattctctttgtaggtaggtgaacattcacacacccagacatagctatatatgttttatatacctaaatatgaaatatacattttacagatgcttcactcgctttctttctgttcacagaagcccaaaaatgtatgtgccaaagggacatttaccatgggcttcaatcacgctgggtgaaggagaggggcactgtaatgaggtgtctggctatctgaacgaaaggcctagctactgaacccacatttacatgcctggcattagttcacatgctagagaactgctcaaattgaggacagcaattaagacacacgttatttcttacgcataacagatttaaaagttgtatccagcatctactttattcttcttactactgacatgaatcacacataaaatactctctcgggttgtgtatatctatgtgataattagtaacacagtcaatttagtttagtttttctttttcctctgaattcaagttaaacttggctcagcaagccaggtcttcaccaacatgacacctacaacgtaggatggttaatttagctttctaagttaaccagttatatcatgaaagcccaaacttactcagcttttcttaaaaaaaaaaaaaaaaaaaatcaccaaaccttaaaaatatccaagcattcactactgtctatcaaggtaggagctggggctgagatcatgagacagagtttctagacctaagaatctatgaggtctggaactctacagggcactttatacctcgttttatttaaatctcacagcaattgtatgttttacagatgggaaaactgagactggggagaagataatctgcctgagattgcagagctaacagctgggaagcaaggattcaaactcaaactcatatctatctgggacctggctcttactcatgaagttagagccactcctcaagtctcaggaagtccttgaggctggcctcaagccagggaaagtcttaaggagaagaatttatgctgcaaggccacagaagggcagatgctaccaaaaaaaaacgactgtagcttgttgctgacagagtggagggagatgcagctgctccgctccttctctggggacgtgtccttcaggagaggcttcctgcccttctacagcttccctgcgttgcgcagacacacagtgatcaactccctggagagaaatgatctgcactcggggataaagactgacaccaatgccaggcccagaaagagtatacctgagacgacgtttgatcaaacttactatctcattgtgtaattgtactacttgcctttatttctagagagctggcagatgctaatgttccacttattatgatacagcaaaaaagggcactgggattcatgtccctgagtctgggctttaattccacatctgctactaacttgtatgactacaaataatcctgatagttacagtaataataaaaaatgccctttgggccgcgtgtggtggctcatgcttgtaatcccagcactttgggaggccaagatgggcagatcacctgaggtcaggagtttgaggccagcctggccaagatggtgaaaccccgtctctactaaaaatacaaaagttagccgggcatggtggtgtgtgtctgtaatcgagctacttgggaggctgaggcaggagaatcggtggaacccaggaggcagaggttgcaataagctgaggtcacgccagtgcattccagcctgggagacacagcaagactccatctcaaaaaaaaaaaaagccctttggtcctatgttttatacttgggactccaggactatttcccacacaatcctctgacgtccttaaaagaacactattttatctcaactttacgtgcgaagaaactgaggcttagaaaggtccagtccaggccgggtgcagtggctcatgcctgtaatcccagcactttgggaggctgaggcgggcggatcacaaagtcaagagattgagaccatcctggccaacatagtgaaaccccgtctctactaaaaatacgaaaattaggtgggcatggtggcatgcgcctgtattcccagctacttgggaggctgaggcagaactgcttgaacctgggaggcagaggttgtagtgagccaagatcgtgccactgtactccagcctggcgatagagcgagactccatctcaaaaaaaaaaaaaaaaagaaaaaaaaaagaaaaaagaaaaaagaaaggtccgatcacaggctggtgacagatgaggaacgtgaccctgaggcgtgctcttagccactctgctacactgcctctccgaaaagaaactaaggcttagagaggtccagtccctgcccaaggtcacacactggtgacagatgaggaacatgaccctaaggccatgctcttagccactctgctacactgcctcctccaacagatccacatctgctccctgctgatcccacagagctgccctggagccataatgaagtatctgggggaacattaaaaaagaaaccaaaaggccggctacggtggctcacacctgtaatcccagcactttgggagaccaaggcgggtgaatcatggggtcaggagttcgagaccagcctgaccaacatggtgaaaccctgtctctactaaaaatacgaaaaaattagctgggcgtggtggcatgtgcctgtagtcccagctgctcaagaggctgaggcagaagaatcactcgaacctgggaggcaggggttgcagtgagccaagatcgcgccattgcactccagcatgggcgacagagcgagactccgtctcaaaaaaaaaaaaaaaaaaaaaaaaaaagaagaaaccaaaaaagccccttaactagaatttatgatagttccaaaagaacggaagtgtgccaagaccaatgaagatctgtctggtcacaggtcaacacccctaataacaaacttaataaagggtggtccagaggcttacgagtcttatatgaagtactgacttgcttaaagtaacctgatgaccaatggagtctttaacagcttttattgttcacagggatctttgctgtggttgatcaaatttcacctctaaatatgactaacatttccttatttagaaaaagactcaattatcttggtttagttaatactaataaaggcatattggtatacagttaaatatatgtgctttgaagttaagacttcaaatcccagaatgactaaagcatattagtgtgcccctgtgaaagttcctttacctctctaagtctcagtttcctcatctataaattggggccatcaccaacttctcggattgctataagattaaatgggaccgtgcacataaagagtgtagcacagtcctaggttgggaacacacactttgctaatagaggctatggctatctcctctcctggtattacatacatttccttagatgctctctaaaacaagagaatttaagtcaggctcagtgaaacggggtccctccctgctcagggagaataatgatccaaatacaggcacatgctaaagcatgaaagaaactcttaagcttgatctatctggccctgattttccagttcatcctcaggcatacaaaaacaaatgtaaaatattcaagtgattaatatctcatagacaaaattacatacagcaacactgcacccacacacgggaatactgagtaagggggtggggtggggtgagggaataatggtctagtcgggtgcagccttaagagaaggagcaggaaagggtgtccagggctgcctgcacctgctcagaatctccatatggaactgcatggataataaaaatttttcttcttaatgatctcaactttactcttcctctgtggatagcacacacacattaaaaaatggatgaactaactgtgtctgaaaggagacacagagatacttatttcttccatgctgtctgggataggcaggtctaggcagccgtccttgctgagaatctggacagggaccaccggggctgagcgtgtggcactgcctccagactcattctggcctggacctcctttctggggagcctgctgctgtctggcaggcttccagaatggaccgtagcccactcgctagatgagagtggcaaacgcatccagaagcaaagacgaggaaaaaaaaaaaacaatcaagatttggcctcatctaatgttcatggttcttaaaataaatgtattgcttgacagaggaagtaacccatacacaaagtctctactaccccaaatcaagtgagtcacatctgttggcagcgagcacaataaataacaaaactcacctgggctccccatcgtttccctttaaaacaatcatctcttgtcagaacacacaaaatatcttccatcttaatctcagaaacgctgtaaaaggaagggcacagcaaggtaactttttgctctttcaaaaacacccaagaccttgatgcacaaaactggcctattcttgagctaattagacatgaagtagaagtgacaccttcctaggaaaggaaatattttcctaaacccttaggaattgagaaggggacctctatgatattaaagggacaggatgatattcctgacaatttctttcctctctgatgaatttaaaataggctacatttagaatttccttaatagagattatgtcattatttcttaataaatcttgaataccaaataagtgtgcccactcactgatccactcccttgatttgagcagatgatgatgaaatagaagcattttggtctctttagtttatactgaagaggaaaaaaaaaaaaaaaaggaagaaaagggtggccaaacatcctccactgtggggtaaacacccctgtgagggtaacgagggcacaaagccctgtcccagcagcactggcctttcttcttctaccctggaggagcttcactcccccatctcttaattactgatgggtgaagaccaaaggatctctaacgaagccggagctgtgtgccaagcactgagacaagagcttgggcttcactcaggaacagaagccacaaggagccagaacacaacagtcagacctgcctagcagtggagtctggaaagcctccgcttcatccaatcaactgcaaggccacagcatttgaatgtagggagcaaagagagacttgcgtgtcagagatgaaggaagaaacgtgagctgctgaaaggatacttcccagggagaaagagaaacagaaagagaagaaggagttctgagggggaaacagatcataagaagacaaatgattttgttgtatgctcttttttttttttgaaaatgtaacagcaaattaaaacatgaatggcaacctcttaggtgggagaagacaattctccccctttcacccaaaggttactctgacaaggctatgaatgaaaatgccacgtctctgacagcgatttacctgaaatgtgtcatctccctgcacacccccagccctcacccctcagcatcctctctctgctgccaactcacagccctatggatgagtgaagcctttttacagcagcaaagagtcaaccagaggaggcagagcatgctctgaaagggcaggagtcagagggagagtgccctgacttcatgggaaatctatttttcataggagagagcaatgcatgggtattgaactcgcctctcatttgtgcctggcaccccgagggaaggtgaaaacagagcccagtcccatctttttcttggtctgatttgcttctattcatcacttttttcttgagaaaaaaagaggaaaaacacaaaaataaaagaaatgcaagaatttggagtcaaatcttgaagcagaaagaaaagagtaatgccgtttgcagtcaggaacagaaaaagctaaatatgccacagaacagtaaggcagtgttctcaaatgcgtgtgctgatattccagccagagtgtggctcatatgctgtgtccacatggcgacgtcggggaaccacacaccctaagcaaacaggagctgagagggaacgggagtgatttacagtttaaaagggccttcttcctcttcctaagaaactgctgcttctgaggaacaaagcaaatctactatgattatttatgggtccatcaacagatctgaatcacctcaccttagtatgaaacgagatggataaataaataaattcagggaactgtcttatgcctgatctaagaaatacacattttgatgaagcatttacattttaataaaccaatgatgattttcattagaaacacatttaaaggggaggcagaaaaaagttaagaagttgacaaatacaaagaagtcaaaagaatgcagaagcaaagttctgagcatctagacagaggtggcaatggcccaggaacctgtctcttgccctgtctgctccattcaactgctagggcgagcaccgcagtgctcgatctaggaaggcgggcagccatttgtcgtgctggcccttgctgccgagagcctcggcctgccttctccaatctgccctgtggtgcctcagccctcccaacgcccctctgcctggctctcatgttctcaggcacgaaacatgcacatgcttcctcctcaaaaaatatttaggagtcgaccttttggattctagaaactttccagtctgcttcttcccactgcgcactttgcaactagttaataggggttttgttgttgtcgttgttgctgttttgcattaagtcaaagaaacagttcatgtatagatacagccaatgtagggcctttcctcaaacagaaattgggaagaacaatgcatgactgcaacgtaataacccagattctgatgtctgtttaagttgattacagtgcacccacgaggcagcagcagtccaggcccaggcccctcacaagtgagttttcagagccgacgccagtgaagtggggctcatgcaaggaccctccctcctcacgcaaatgctcttccaccaccctgcagagttcctccccaaaagacctacttcctcctttcagaagaggtggcgttatcactgagttgtctcctttctaatgcgggattaaaaagggagtcacgtaaatgcgggcacactattttttccagacaagatcatcacagcagatgatggtatttgttatgtctttaaaatatacctgactccctaatacttcgtgcctttgctaatcactgttttcccttctcaattttagctttatatctgagcccttcatagcaatctacttgaatgtgttattagagaaaaatgaagagagcagagagaggcacctctgctgttaactctggcattagacaattatcattgggctctgcaactgctgtcactcatttttcttaggaagaggtcatgttaaagtgaacgagcatgggggaacatccagagagctgcggccaggaaggaatgggaaaatggaatttgtagctctagaatggaaggaagaggaaaagaagtgtgaagcgactgacaggctgttatggtgtggtgactacattttctattgtggggttacaacacaaaattctgaagatgctttctgcatgtacacaaattcctatgacagagaaaagcagccaccagcagcattatgacgggctcccagcctgtgagaacagggtcagggaggaaaaggaaactggctgcgccagcgggcttgcattttaccttccccagggttcctggtacacccgccctggtgggtgtcagcctcgatgctgaaagggcagcaaagagaggccagccagcctccagctgagggagctcagaactcagccggagaagcagcgctgggtgaaaagtgactgactgatctatatgagacttctttcactaataagatacaatatgcacatcttccttaacaaataaaaaccactctttcaactgacagattgtgttaagataaagaacacactgaagaaaggaaaacccaaactattattttggccccctgacattacaaccaggagtagtttcctgcctcccccaacactgaaggacacacagcatgttttctgaatgagcctcagtccgtaagtgttcacactaacaaccttgaaagagttttgaaaagtcttactagcatgagaggcagagttctgcggatgggagacggggcaggtgtggtggggacagccacacacggctcctgcaactgagtgggctgcaccccacaacaggcccccaggctgcctgctaggatgttttcattccaatgaagaacgtagtgcttttttctagcactgtactttaggggagaaaagtgttgcagttttatttgatgttttacataaaacacagggctgggcaaggaaaaagaaataagactatcccatttacagcgagctgggctgtgtgctcatggcacaccaagtctagaatccagggctttacgcagaggtatgaggtgctgaactgtgacacacaagatggcagctgaatgtcctggctgtgagtgtagtgtggatttcaactgcctcaaaatcatttcccctgggttcatcttcctgggggagggaaattgtgtgatgagtaaaaagcattatttctttaaaagacaaatcaactttgaagatacaaaccattaattgcaagaaataaaagttgtgaataagagtcctttcagaagctgcgaagatggtgcacacttatcttgcagcaggagaaacgaaacgcagctctctaaaagaaaaccaagtacaacacatcgtcctatgacttagtctggcaacgcaatgaaaactgtcatgtgctgaggatattaaaggttttagtttttgccactggctattctgggactcatttagggatcacaagggttaatggctcttcgtcagcttacaaggcccattcactgtaaaaagcgacagaaagttaattaggtgagaccagccgaaaccccattcaggtttctgactcacttgattttgtgagaagccaacgagttgacatattctgcctccgaaggagccaaaatgagcaggctgctcccatggcagccaatccgggcggttcttccaatccggtggatgtattctgcaggtgaagatggagcgttgtactaaaaagggtaacaaaaatgaaggcattcatagatcaagggactgccattaattggaagtgcaatactcctcacctgcctccaggtatcccaagaattaaatcctggtgctatggttaccctaacacaatcacaaggagaagtcacccaaccctgaaactcctggcttcattggaaataacaaggctccgacaagcaaatgtgaacagtggccaagtttccgataaacgagacgtcttctcatcccagtatctcctttttaattttacttctccacaggtctcttcattttcttatttgcatcttttcactgtggtgactggatgaggtgaaaatgtaggcaggtgggggtaaatttctccaggatgaccacatgaccttggcctacttccttggtagacaaggccacagggtgaggtgtccagaggacactggagggtgtaaggatgaaggggctccctgctctgtgggcagggtctacctctgatgccaggccaccaggagcaggccccaggagctggtccccaccagcctgcagcagccccactcagtccttcagaatgacggccattctacagaatgcgggcaggtgaggggcaggttccctgcaggtagggacatgcttctgcttgcacggagagcactgccaactcagagaaaagagcagactctatcactcattacaatggataatgcaaagcattgtatgttttctttggcaataactttgtcatcattaaagctaattgaccatccactcattcttccctatgttttccctttgatgctacacatatcagagagatgagggccaaggtcaatataatgtatgggaggctaggcatattaaatgaatcaatattcacaatataagctctaaatgatcaattctgtatgtctggcctcccatacattaaaattgtcattgccttatcttcagttcactctgtggccagcaggaaagaagacacaatgcctccagttctaaagtgatcatctgcagtgagcagatcagacatcctggccagtgacaggcatgcaatcccactaaaatgtgaataaaccatgactcacgtcaacagggcatgtcccccagccccgacacaaaagggcttaaaaataccattctgtagactaatgaaaagaaaaaacaaaactaaaaccaccagactctagtgctaacacctgtaccctctggcaaagcgtctaaggctagaggtatgtgtaagatgctgtcaggaacttaattgctccctgcaggtcaacgtacacggacacggctctcggacagctgagccatctccttctggacacaatgaggcctcccagggaccgaggtaattcccattattttcaggttgttgaaattttggtttgtgacacgaattagtctagaagcaggagagcctgccacctccctctcgtgaacgcacattctggctgttttgctgcagtggtgaggtgggctgggttaaggaaagatgtcaggggaattgaacagataaggctggtttgctgcctggttaccagggcaacacccaagaggataataataattattctacttaaagccaatgcatctactcatgatcatatattcctgcctaaagcttacaccttaacaactaaaaaattacctgaacaatccacgtgacttgagggagatctaagccccgagctgcaacatcctttaacaaagaaaagaatatggtttaacactgagtttctgaacctttctggggtcctggatatgtttgataatttaatgcaaactctgagagttcacccgcccacagtacatgcacattcgggcatacacgtatatgcccagtacgtgtacacacacacacacacacacacacacacacacacacacacacacacacacacacacagtcctgcatacaacttcagggggctcagggacctactgcagtcctcttgtggttaaaaattctgatttaggggcaaattctacagaacccattgatgagggagtcacaacaccctttgctaaaagaatccacaggttagcctaggaacttaaacagtaattatcagttgtgtaatgtaaagaactctgaactcttctagcatgttttattgatttacattttatctgaaaaaccacttgaggaacacattcatggattatcaccccccgcccacaaccatgagcaacgcctaacaagctggccttgaggtgtgttctggaacatctcccctcaaggcattcgctgtgggagtgaagtgcaaagtatttacttaggattttgctttctggcctcagagagcagcaaggatctagtaaccccctacccccatctcttcaggtagctggattagaatacaggccaagcccattaatcgcttcaaagatttagctagatagctgaaaaactataaaagcaatggagatttattttttaattttatgtatcttttcaactagtcaccacccaaagagcaaaaattctctactctctctagtctctcaccattctagcagaccagaaagtgggaatttccctgactttagcatacatctgtactcagcattcattcttcaagaataacagtcgtaacaagagtgtcccagccaacatttactgaacacttactacccaccacacactgcgctgagacctttacctgcgttatcttgactaatcctcaaaacaactattacccccatctgacagatgacaaaaccaaagttaagagagataaagtattttgttcggggacacacagctgggaagtggaaataatcctcgaatccaggtctgctttgctttttcaaggccatattatattataccgcattccaccatcaaaaatgatcccatgtccctcatatgctgctggtgggaatccctatggcagggaattgggtagtatctagcaaaattacatgtgcatttgctcttgacccagagcagtatcacttctaaaagtccacacaaaaaaagatacactgacaaaaatacaaaatgatataggcatgaggccattcatttcagcactatatataatttgtagatctagaaaaaaactgtcaaccagcagaagacaggttcaataaaatacagcaatatctcatataacagagtactatacagctataaaaagaacaaagatttctatatacggatatggagactctaggatatattttgagtgtgtctagtatgcttgtgtaagaagttgggaaaatacaaacatatttgctcatatttcagtaggaaataatggtgggaagaacccccaaagcttaaaaaaacagttatcgccaggggaggaaaagaagaggaaggacaggataaagatggaagctacacttcctttaatgaactttgatacttttgactcagaccgaagtgtattggcataatttaaaaagataaacagctgtcactataggaaacacagagtatcacttatgacatattctcgccaaacaaaataaaacctgaaacctagaacctaaatctaatcaagtctctagatccaactactagtttacaggaagtatgggaaagaggaacatgttgaacaccgtgaggacacaattagccaaatcctgaatgtagggtattctaaaagacaaatgatctggtttcttcaacaaaaaagttaaataaaggaggagtaacgacacccaaaacacattaaataggcagatggagaaccaataccatgatagaggctcacaaaaccaccaactgtggttatctctggacagagggatctagggggatttttacttttctctttgtgtttggctttaacaatgaattcttatcatttcccctacaatttttatttagaaaaatttaaacctacagaaaagttaaaagactagtacaatctagatgaaggagatacagatgtaactcctttacctagattctgccaccaccagtctttggcccatctgtgttctatctacgcatgcccacgcacacacacacatatgcaagcacatttttctgaaccatctgaaagtaggttgcaaacatcatgacaatttaaccctaaatactttaacacatacctcctaagtaaaaggacactgatctacataaccacaccaccattatcacacctcagaaatttaatgctgaatagcattttctaataaacagtccatattcaaattctccaactgtacctaagatgttttttttttttttttttttttttaaagatggggtctcattctgctgcccaggctggagtgcagtggcacaatcactgctcactgcagcctcaacctcctgggttcaagtgatgctctggcctcgacctcctgagtagctggacgaccagaggtaagttccgccacacccagctaatctagactctttctgcccaggctggtcttaaactcctgggctcaagcgatccccccatcccagcctcccaaagcgttgggattacaggcaagagccaccacgccttaagatgcctcttacagttgtttttctttcctaaactaggatcagatggtaggtcacgcactccgttgtgtctctgtagacttccttagtttggaaccacacccctgcctttgattgacttacttagtttttcgatgtctgtcattttttaagaacatcaaaatgttcctgaggacatcggacaactggatttgtctaactgcttcctcatggtaaggttgcggttaggctttctggcacaaacaacctcagggtggtgtgtgcttcccatggttccatgtcgggaaacacactggggcagtctgtcctgtatgggtccctctgttgagaaggtgactttctccttcgtaatgagtaagtagctggggagttacactttgagaccatgcgaatagcatggtcctgtttcctaaaacctttcacccaaggcttttagcatttactgatggcccttgtctgtactgttaccttgatgactctttaagtctatcattccttccatccatttcacagctctgggatacttttgtaaaaacagcccacccccaacctactgttaagtatcacaaaggattcatatgtacatagcttttttttttttttttttttttgagatggagtctcgctctgtcgcccaggctggagtgcagtggtcttgatctcctggacgtcatgatctgcccgcctcggcctcccaaagtgctaggattacaggtgtgagccaccgtgcctggcctgtacatagcttttttgaaaaacaataatactatgcaaaatttctataagaaacacactcccggtgggcgcagtggctcacacctataatcccagcactttggggggccgaggtgggtgaatcacctgaggtcaggagttcgagaccagcttgaccaacatggtgaaccccatctctactaaaaacacaaaattagccaggcatggtggtgcatgcctgtagtcccagctacttcggagacagaggcaggaaaactgcttgaacccgggaggtggagggtgcagtgagccaagattgcgccgttgcactccagcctgggcaacaagagcaaaactctgtctcaaaaaaaaagagaagaagaaaaagaaaagaaacacactcctgcttcccccagcgtcggaggcaggacttgagggagacaccatcccaccatcactcccccagaaggaccactgagggtacctcaggatttgtctgtcttcactcgtaactgagatttgcaggtttcctttgaatgctggctaggctgcatttataagtgtgtaagcagaagttaaatgcactaaaagtgtgtcaaccacccacaaagtgttttcagacagctcccacaggctctggaagctgaaggctgatgttgcagagctgatgcctttgagaacacaatttaggatgttctctatctaaaggggagcgggagccactttctacaccaactacagtttatgtttttagaaacactgatgagttcttacatctgcaaagctcttgtgaagaactgatttcttgtctttaagtgcactgcagtgggagatccacgtaggcacgggctgcttgagcttcacagacgtgccttgtaaaaatttaatgctcattggcttagtaaattcaaccagcaaacactaagactctaaagactctaaaataacatgtgacgttcatgaaactcactgtgagtccaaacacagcgcaacagtgagtgatgaagggcgccagcagcctgtcattgtgtcttcaaggctctatttcctacctgggtgacctagctctggacaacaggctaagacacaatcttccggtctcccactaatgcgtgtgttgggggaacctcactgacggccagccactgcccaatactccttgttttctctcccccagatttaactcagccatttctttaggctaccacagtgaataaggagaaagaaaggcaagtcctagtctaggaagagagaactggactgcttgctccagtcccacttaggggctgtccaatctgcgtgggtcagtttggcaagctgagcctcagctgccccgcctataaaatggctgggagaaccatgctatgtacgtcatgaggttgttgctaagatcaaatgagaccacgtatatgacaaatatcttcagacctataaatctcagtattctgagactctgtaaatctcacttatcctggtgaagtaagaactggtatcatggcaattaggcagagaagtgatttcaatgtctctgtactctcctcttccatcatatctcattctctgcccccgccctacccagggagaggtcccagggaaacagcagaggctccatctccctggagcacagtcagccagctacatcagatcaacaggagatcatgacccaccaagactcagcagaggattctgttctgtctgctcttagaacttagatgtagcttcattttattcctttaagctaattcgagcaaaagaattgctaaagtcagttctgaaagacactcaacggtgaggccttgaaggccctgggcctgacaattggctgcctccatgagacctaggagtacagatggaaggcagcttgctcaggtgccagcctgtcagttggattaaaatgactcatttatttacccaagaacctcacaaagtgcttttactaacagggagagggggcctgccgtctctctgagaagggacgcagcacactcgcctctgacgccttcccggcctgccaaaagtcattactgccgtgtgtggaaagccatcagcagggtccaggcccccgttgtccgggtgacagattgggctgcgtaatcagaggaggaaggagagagtgcagaagctgtcagaggcgagagatcttggctggagccgccaaaaaactggcaacatgagttagcgtaactgagtaaacagcaaacaatctccaaatgatctttccattaacgaaacaaaataaaacgaaaaagatacactttacctaaaaagcataccccagagaaaagcacgaaagtctacatttatttgggacacagaactgacattgtgactcttcacagccgtatctcctttgtctcctagcctcctggcacggtggaaattccccaggaggagaggaaattaagaactgcacagacagaacagtatgcttcaagcggaaaaaaatacggagaaggtggaggaaagcagcacaggtgatttaggtgcatcttctgaaaaagaaatgcacgcgccggacagccaaggaggatgccaagggacagttggcgcccagggcgggctgcaggtatctttcctttctgggaaaaaggtgactgcactccatccagggacaatcaaggacagccaccggagaccaacagaaaacctaatgtcagccttaaaatcaggtggcttagaaactccattttccggccattcggtggtacttcttatcaactcgtcaacataatgatggtattaaaagcaaggttcctttcctctggcttagggtgagttcttcactgtaagtaggaggaaataacattttgcagataatccagtgtctgatatctgatccctttgattgcttaattccacttgggaaagtgggctttgaacttccaatgactccttcttgctcatccctacttcctacttaacttggctttttcttagatctagttttccagaagacacgaaattacattgtgaatgtgtgaggactcctcgtctttcacacactgatttcttttgcccccagctatgctctgcctagactccatcttaccatagccacaccttcattgaacagccacattacacaaagccacattatcaggacttgcgagctgcatgaaactaaaaaggtccctgcttttgagatgtttataatgaaaatgaaatgaaacacacacatgcacccttaactgttcctagcaagaaggaaaatggggtgggggactttttaaccatgaaggaaacagcgtaattgtgaacttctgtgtgagcacactgctatttccaaattttcataaagacattcattctggccttgttaaaaggatctcgggatgataaattaaaatggcaaaaggcacagtataaaggggggaaaatccccatgtaacgattaacagcacgattcttctttatcaaaagaagccagttctccatctgtctcgtcctgaagtggccctcgttcctcattaacaccaaggaggctcctggagagtgttcggatagcctggcaagcaacaggctgcttaaaaggacgcagagtggcagcatctcccccgacccaggcatgatctattacagcgtgtgtgtcccactcgccccgcagctctcatatgctagaagcatcagctagagcaaacaagcatggcagaagagccaggaacaccgagaggaagcgaagaacttcccacgactgggaaccggccctcctgttctggcccagcaaccgagagaaatgaaccccacccagctcttctccagtcatcttcactacacagcaaagagagtccccagaatatcggcatgctggagtgacctggactagaaaatgaacaaagactgagggctttagagaaatcaggctgtgggcgagggagagttctctttccatgtggcacctgggactggcagggcgcagagggctgggaggtactgtgctttgccaagacaatggcattctttgtctagctgataccacgtgcctgcaggtatcatcagccagacagaacaaggaaagtgattgtatgcttttgacctgagaattatattaactatttcagaaagaataatcttttcttccacgcagagctactaaaaatacaaacaacagaacttcagatacctggagttttctttaaggcttacaactcactcatgtctgtaaagtgtttgcatactaggagactcaacaatttctgagggataaatccagcatgttatgggtcaaagataaaatattctgttcctataataacccaaactccaccccaaaggttcctactgctttctatttcaatattcacagtccagaacattcacttctcagataacaccagatgaatgaaaaacttattcccagtgagcaagtctattaatctctgtctttagaaaaacacacacactggtagctcttaacatcaagtttcttgggccctgtctagcgcccccaatttgatctacaaaaccaagcgcctactgcatgcctgctctgtgctagacactgggatagaaatgcaaacaaatcacagtccttgtcttcatgatgcttacgaccggctgggaaggcacgcagaccaggtgggatgatcattacagtgaagaaacgtagggtgcattgggacagccccatggggaagaatgggggggcttctgagtttcatttctctgaagacataaaatttaaggggagacctaaagatggtttagtcaaaatcatggtagtgttccaggcagagggactagcatgaatcaaggccccaaagctagaaaaagccagatgatacattccaggactgaaagagggggctgttttgctgaagggtagggagcaagggggagtagggtgaaaagagacaaataggggtcaggttccacaaagtattgttagatataataaggatttttgacaaatttctttcccccgctttttttcttttgagacaaggtcttgctttgttgctcaggctggaatgcagtggtgcaatcacagctcactgtagcctcgaccttctgggctcaagtgatcctcccgactcagcctcctgagtagttggaactatgggcacgtgccaccatgcctggctaatttttattccttaatattttttgtagagacggggtcttgctatattgttgctcaggctggtcgtgaactcctgggctcaagcgatcctcccacctcggcctcccaaagtggtgggctggtaggcatgaaccatcacacctggcccaacaaatttctttattaagtagattatttggaattaatcttcactagagaccacggataaagatggctttagaacaagctcgagcatctgactcgtggatgggcctcataaagggaaggacttggtcagacacagatctcctcaggaggcaagtattccatggttacagctctcaggtctgaatgagtgtctgcagagccactgtttgcctcacacacgagaaatgacactgtgataagcaggttaccaataagccccctcttgcagataagcacacatatataaacacacaagaaaccatgctgcactcatacagagactctacacttaagacagaaaagtctccattgcctttaatactgaatatggaatacaagttccttaaaaagtaattgcatcaaatgtggcctagatgggcattcaaacagcttagtatctttgtttctacccagcacttgttcactggattgactaaatttatggtacaatttcattactgtgtatatagggacttctccaataaccagctggggattaagttacatcatccaagatggaacagagaaggcattttaatctttggagatagcaacaactacggtaaagtgaatccccagcctgggggtagagaacactgaaggtttgagtttttaatctcaaaagagcacaagaggcatgagtttaaaaggtcagtgttgtgctggaggaggcagctatcccggactgcagagcctgaggctgagggagcaggccctgaaatcacaggacaaatgatagtcggagacagcagcaaataaaatcggcccaaatgcaccgattttcctttaagaaaaggtaagcagaggcaatcagagtcattttgttgtggaaagactttctcagctctaattactcccgatagctgtaatttacaagtttttggtggatagaaatctccaagattcacacattttcagaccaacagctgccactattagtgagcaaattgccaagtcttctgcacggtggtggctggctatctgcagccctgtcaggtaacaagaaagaggtgcaaagaggccagccccaccaaggggcccctagtgttcctgggccctgtaggactgaccacaggacaaactgtcaagagacgaaagattacacagccatcacagaaatgtatcagccttcacatggaacacaggaggatacgtaccgtgcaaagaaggacgcctcttctggaatgtgaaaattcctgaaacactgctgttctttcctacaaaaacaaggaaaaatagagccttacaactcagagacaaactccagcaaggtaggcttacatctccctagctctctccatctcctactgctagagctattttcaggcacagagaggtttgccaggaaagaggaagaagcggattctttacatcttctaagatgaccctgtacttacaggaccggacttgaggctacagccaagtagcaggcgctttgagggtgcatttttgtgagacactaccagggcaggcacactctccaggaatggccaaaaacaagaacaggaaggcacaagttactgcatgcagggcttcaagcctgcgtgcaatttattctaaacattctcctacaagtgctctgaaggaataaagaataaccaaccttctctacaggcagttttttaaaagattagatatttataaaactatgtattttaattggagagaaaatatatttacattagaggaagaaaatataataccactcaaggcaaacccccactaccaccagggacaccttgacgtttcccgagtctccattttatgcataacataaccaaatatgcagctttccaaaaaaaaaaaaggcatcctactatttatactattaacatgctcttatatagcaacagaatatgaacatctcttcatgccaataagtatccaaagaccaggtcatctgctgtggtgaaatagtattcaactaaatggatgcaccattatttacgtgaccaatgttgtattatggcaattaaggttgtctctgatttttttttttttttgagacagggtctcattttgtcacccaggctcactgcacaatctcagctcactataacctccacctcccgggctcaagtgatcctcccaccttggcctcctgagtagctgggactacaggcatacacacaatgcctggctaatttttgtattttctgaagagacgaggttttgccatgctgctcaggctggtctcgaacgcctgagctcaagcaactcaccagcctcagcctcccaaagtgctaggattacaggcgtgagccacctcgccctgctgattttttaatattgcaatcaatgctgtgataaacatctctataaataagtcactgtgtagattcttaattactcccttaggttaaattcctagaaacagactcgctggaccaaaaggtgagcatcctagaatgctttcagtatgagcctgaaacggcgcattctgagtgctcttcagtcatgaagctctatgcacttgagttggtcacattcacctgtcagcagcaaatacaaagaaatagaaccaaactactcaaaatctggaaaaaagtaaagtctctgccgctttggcacagtcactatgtgctgtggcatgtctttctggtctttcctgtgcgtagattttgtccatggctggaagcccggggcacacctcactgagtacactggataaagacatacaaacaacaaacattcatcgagtgcccaccatgtaccagacctcacacgtctgaactttgctaatcctcacaacaaccctatgtgtaagtactatcatcacccccattttccagaagaaaaaaactgaggcacagacaggttaaggaacttgcccaaaggacacgcacacctggtaaagggccggaatgatatccgaacccagggagctgtgttccggagtcagtgctcagaccctcaaaaggacagatccatttgtccagtctgctgcacggtctttataaacgatcatttttaatggctgcatcgtagaatcaaaatcagaaaaaaatcagaaagttcataaaagcttatgaaacaccttaaagactagttatgatgtattcagatttggggtaagaaaaaaaaaaaacctaccaaactctagactttcatcacaactaccatgcaaatagtaacgtctatccaatgctcataaacttttttagaaccatgtcaaccatctaaggagaccatgctaaggccttgtaggacagtggccagggtaataagtcaggaaaatttaagtgggactgtttcagcttagtctggaacaagaaactcacccctaatacttacaaaagaaaacacagggatactataacctcctgtcttccactgcaaaggctaaatactacacagacattctactttttaaactataaaaacacaattttaactataaaaaaacaacttttaaactataaaaaaagaactattcctgaaagacagataaaaacaatagtaataaaggcactttaacatctactgagcacttcctgtgtgctaggccctgtacggagggctttgtctgcattaactcagccaaccttaaaggaagtacaattatcatccccattttacagacatggaaactaggtcacagagaggttaaatatttacctgagattacacagccagcaagtgacagccaggacaagaccacaagcagggtgcccccagagggcacagctataaacagcacgctagactactcccctgttacaaagtgagatgaacagcctctgtataatgaagctatagactcttgtgtgtgatctattacagcgaattcctagaccattctgagtccatacccagctccccccaaccacgcttggatcgacgccgcagaatgcctctggtaaaaacggattcacaggattagtaaacaaagcttgaaacaaaaacaaaaccccaaaccattaacggtattaaataaataaaaccaacaactttgattgaatcagggatccaaaggtaaagaccaagagtttacctaatgcgcaagggctggaatattcagggatttctatataatcttgtggcaaataaccggtgtccttgagtgaccttgaacaagttcgcttttctgggcctctatttacttaattattaaaacaaaagagcaaaagcaaagagaggctggacttgtttaggatcgtgtcaaacctctagtgtcccttttagctctaaaaatcttatgatcttttaagctggctcaagtcaaatctcatcctgatttctagttttctttcacactttctaatttttgaagctgcctggtaacctctcctctagggcaaaatggctcctatttcgagtcttgctcgttctttctttcccaattccagtgagtatatctcactcccatattccaccccgactccataacaaacggcctagttaagagtggaggaatgcgactcacatagccaagtccctaaaataggggaaatgttgtattcttcttcctgaacagaaatcttactccgtgccgagaaagaactgggaacccgaagcccctttggttcacggtaccctctcccaaccgaaagtgttctgagtgcagcgctgtgtcttgttgacaatgacagcagccgtgctcagcagtaccatatgggatccacaatttagctccattaatgctcttaatttgaagacatcaagccctaattacacactgggtactaaaaaggcaaaacccttccctggtgccagctacttagtggtactctgttgccttaacagctggttgaggtagattcaggccaagtccagggcctgtgagctctctcgggtggaagagaccagctcccagagcaaaagcaaatgggaacaatagactccccttgcccccatcaatccagcagtgtgatcccctctagtttcagtgggtcacccattttcgtctcattcttgacttgcccagtggagtgtgcaagggtcgtagccattgctgagcctaaagaccaggtttgccggactcaggttcgcccccatctccacgtggggccgcagtgttgtcgctgcacagggagatcagtgctcacctcctgctccatgccgccatgcagccgtaggaattttaatcgcatggaggcagatggcaactgccctgatgccggcgcccctgagctgctcagcagggtctgtaggaagaggctgtagtggaactccaccagctcgcaacttgagaaaaagacaaccatcttctggtcttcctcaaactacatcgatacaaagggaggaaaaaccgacatattttaagattaggtgacgccaaaacgaatatttctctaaactatacagtcatgctgacccccatttggaaataaaggtgactatctttgaattatttaaaaaaacaaaaacaaaaacagtgatactccactctacaaagaatgcaggagaggaaaacgacacagctatcatttcaaacaggtttcccttatctgacaaaaataaacacacctgggagcacagctgtgtgggagctccgttccctttattcgcccagggcttgccacatgcaacactacctggctgagaccctacatatgcagaaaaccttcacccttaagcccttccacttactattttctcacatctcagagtcagcgcagaaatctagtaaataaatacacaaatgccaagactcttggagaaacatgagcacaagcccctacgtctgcctcacatccagctgttcccgccacctgtgatgttcctaatatcagtcccaggaaaggtatcgagaacatttcaagctgaacatcatggctatcattgacctctgagtttttaccataatcctaaaacctgactgaaaggatgtatatcaaagtctgcatccggaatgcagacataagttggaaaacctctgatttttggtgtctcaactcattgctcccaatggcttaacacaagaaagcaggcctttcttccctgaatcaagtcggctctagcccacagtcccaccttgcatttctgaaggatgaaggccgctaggcagacaagcctcagtttgctgggaaccacagtcacatgctgcttgagactctctggtattgcaaagctgtccagcttgtcgccagctggtggaggacagacctcctggaccgctttgtcctttgggttcaactggtcatggctcttgtccaggacagaaatactgactggatcatgcaaactgatatcagctagccgcgttacaccttggataaaagtaagaagggcaaagcagacaacaaacacaccatgaaactggtcacaaaagcgtacccccatacagcacccacccatgtatgttaggactacgtatgttaccccatgggtatcaccaagtcccagcactgatccgccctagtgccaacgtgtgtgttgcagggagatctaccaacgtatctttccatagccattctataaacactcacctatggaacagcgtccaaaagatagcaacagatactgcgcccacccccacctcccaaaagggttctttggtcaagtaagttatggcaaatcttggatttcaaaggtttcacaaaagcgtttttgctataagcagccctctcagggcctttattgtgttaatgtgccctgagaatatccaagggagggatgtggggcatttctcaaactttcttgaccacagaatcccttcttcgtgaatcatccctcaaaaattagaacatagggaactgtgagggaccacatgcatggcatctggtacatgcacatcataatgtggcctagtaaatcaaggaaaccagacagaaaaacgtgaaagctgcactgctggtcaatgactcactgtgtggggtggatctggtagagtgatacaacttttccaagccttcgtgttcccagtgataaaaaagagagctaagaatttccatctcacatggatggaagacagagaagcgcttcattgatatattttttaagtttaatagctctataggaggaagagtgattacattaaaaatgcactcagataagaggtcatcatcttcagtgcaagggccctgctctccatgggttgcaagtgcacaaaaacctcatgaaaccaccaagccaatagcagccagtcttttctcgtcctcatccctgccctttctccctttccccatgccctggggaacatatctgtcttggatgacttgcagagggaagttgggagtgtagaacatagagtttgaaaaggcagtcttctaaggacagctctctccctgcccccacctccctgaggttgagaatcactgcagcaaacaacccaggttaaatctaggtccttcctcttcattaagaacaaagaaggacccatcacttcttttcaactcaccttctgtgagtgtcgctgatagcaagacattctgtcgtttttggcattcagcatttacagcattaagtatcactgtgatgtccttttcaaaacccaaatccaagattctgtgattgtaaaaaaaaaaagaaattttcaactatatgaagagcagatgtggtctaaggggctacagaagttgcaacaaggagaggagaaacagcccttctcttctacctgttatcatcctgggacgaggctcacctgtctgcttcatcaaacaccaaccaccgcagccgactaaaatgaatgttctttgtggattttatatgatccaccaggcgtccaggagttgagataaggatatttattcctttgcggagtctgtttaaaattatatatcataaaagaaagtaaatcaaacagggccacgccagtagaaaacacaggaaaaaggcaaaatagacagactcatttcatgtacagtgcaaacgtgccatagcctgaaatcatgacaaaacataaaaactgggtagaaagctgtacttgagtctttccctgtactgtgaaatgcaattgttaagatctgaaattacattaaaatcataaaactttaactttgaaagggatcataactacataatccaatgctctttatctgactcataaatcctctctagaaccttccaaagagattgtagtctagcctgttctcgaaggtttctgtgccagagaatctagtatctgagcaagtgattccatgccaatgtgctccaattgctaggacacttttttcttatgctaagccctttatgtaacttccattcaacggggctcagctttgtcccatgggttatatacaataaatctaatttctcattccccagacaaccattttcctgtcagtccaccgtaataaaagcttccaatttttagcacattttttttttctttgtagagacgggggtctcactatgttgcctaggctggtctcaaactcctggtcttaagtcatcctcctgccttggcctccctaagtgctaggattacaggcatgagccactgcacccagcctagctggatatattttcaagcttcccttgcagttaagtatagtcatgtttgttttagcaatgggataaaaggtaaagggaacacgccaatcacacaagcaccttcagagggagcaggtatgagcatctctgtacccgctggcaagaaattagatgcaatggttggagtgcctgcaactatctaagactatgaggtaatcttaaaaatggaatcctcccatagtggcacaaaaagacagaaagagcttggtccccgacactggagcaccaggccagccttggactggctctgtcagatttcttaaatgtgaaagaaaaataaaacttgtatattgtttgtgccactgttatttgttattattgttgttattcacagctgagtctaatcctaaccaatgctttgaggtttcaggtttcatatttactcctcagttatagactacatgcatcattattgagtactgattattaagctataatacaataaaaatgttttcaaaagaatgaagacaatttgagatttacttgttgcaacgattttcaactgacacccattacaaatcctaataaaggaacaaacatattcggttgtaaaaagcaagttacaaagcattatataagtgaatgatcttgtttttgtaaaagcaaacaacaaaaccccaaactcttaatgtccacaaaaatgagtggcatgcaggtggatgtatactaaaccagggatgctatagagcattgggtaggtgggagttaagaagttgacagcactgttactagcaacatcagaaggaaacctgtttgtaggtttaatattttaaaaaacagcaccgtctagaggtgaccgctccccactgactcaatctgtccctgtgcaccgggactaggaagcagagcctgagacaaagctctcagcaggtttagaaggacccagccttactgaataggaaggcaggacacattcaagaaggaaacaacaaccaacaaacctcttcctacctggccttttctgattttctcttctctcctcccattaacactccaggcacaatccaggtgaaaggctacagaaagacagcagaccacagtcagtgcaaagccccctttactaacatcagacattgattccaaattccctttccttaaacaaggcatgggagaaaactggtgcttctcattgtataaggtgttattgtgcagacacaattcctaggcattgctacacccatgttcactatcagcagtaacttgaattataggtatataactagcttctaccacagtgagagagaaatgtgagcttcttaaatcattcaagtagcttgcctttcttttcccacagagcctgaactgaaaacacatgtcagtaagtctactgccatttttggggttaagataaaaacccaagcaacacccttccctactctccacccctaataaaagaaaggatggatcaattcatgatccaatttggtgagctggctggctttgattctgaagccttcactctcctttcttaaacaaatcctacttgcagctaagttgctttctactggatcaccatcaggctgtacctgtgaatttctgtatgtggcttgctagtgactatgatgaacaaattgcaggactttatgcaccaggagtcactgataattcagctaagctagaaattggtaggtttagatcagtaaaaacctataaactgcctagagagagcagagatatccaggcaaaaggaaataattcttatctctttgaaaataaagaatagactgtagtatattaaatccttcctcaaagtcagcaagcaagatgaaatggaactcatggtttgccttaccttaagcagtttctggacagtgtcaaagctttgtagagctagctgtaaaaattttaaaagttatagatgatgaacaggatccccctttttttttttttaaagacaatttaatgtgattaggatccaaacttggacctcaagttaagatttaagaagaaaaaaaatcctatacacagaatctaatataccttgttcttagactggttctgcaacctgtcagtttgggcaaagagggtaaagacaacacttctatttcttggacatacacaaaaatagtgttttgtgctccctctgctggctcaaattcccagagtgccacacagagaagttcaagtctgtggtgcacaaaaacgtaagagaatgaaacaaagtaacctgaatttgactctccttagaaagagaaagaatataatatgtacgcagagtaaaccacaatagtgacgcaacagggtagcctctgggaacttcgctctcaaggagcgatgactgtattctacaactgtgccaggatatctgaagcctgggagatggtcgctcctcaagtttatatcaataaaacaaaagcaaaccaacagctccatttgagaacaaagcaagtgaaaattaaagtaggctacaaccattaacaaccttcaaaaatgcctcatacagaatcccgttcttaaagaacgtatatacagtttccacatatttagtattcatgaagcatcctcgagaagtagcaagtttgctgctgtaaaaattttaatagcttctgtgcctgctccttcattggactgagctgagataggggactgcaggctatatgaaaagctgacttcaaatcatctctgtgatcaattctctgtaaggaagtgattagcatttgatatagaaaccacataccctaatctgaagttgcctctgtaggcaaataaaatagatcagatagaagagatttccaccaagaaagaaaaaaatattgaaaagtttaacttttaggaacaagtaacatttttggtagcagtagcttcttaaaaaaaataaaggttcattttcagagccaactgcttttggttttgaataaagttgctaaaaaattgcatttctgtaggtttttttttagcaacttaattcaaaacccaattaaacagacatttaatagtatcattagtttctagacaataggaaaatacttttccatacttatgattctcagagactacttgaatttttctccttgacaagaaccagaaggatggtttccaggcaaatggaactggtgtgcagtggcttgtgcagtagggagaaacatggtaaaaccacttttaaattcaacgggacattagtgaaagcatgtgcttaaaacttgtcccaaaagggagcctgcttacctctctcgttggcacgagcaccagggcataggggccatcactgcgctgttgacacacagaaaaaaaatgccatgagcaggataaacaaaggcagactccaaacggacaggacacaggggtggccggttgtagaacatcagaagcactcttaatgaagaaagggacaaaataaggttgcccactgatgtggtctggctgtgcccccacccaaatttcgacttgcattgtatctcccagaattcccacatgttgtaggaggaagggcaggggggcaggagtgaggtggtaattgaatcaggggggccggttattctcgtgataatgaataagtctcacgagatctgatgggtttatcaggggtttctgcttttgcgtcttcctcattctctcttgctgctgccatgtaagaaatgtctttcgtcctctgccatgattatgagacctcccccagccatgtggaactgtaagtcaaattaaacctctttgtcttcccagtctcgggtatgtttttatcagcagtgtaaaaatggactaacacacccactaaccccattattctagaatactgttctagaggtcctggcccatacaatcagacaagaaatatgatgtataaaattagaaaataggaaacaaaattattgttagcagatgttattttatcttacaaaaaaaaaaaccataagagaactaatgtaaaatctattacaaacaagataattttgtcaagcagctgaatgcaaaattaacatataaaaatcaatagccaggtgcagtggctcacgcctgtaatcccagcactttgggaggccaagacaggcggatcacttgaggtcaggagtttgagaccagcctggccaacatggtgaaaccccgtctctactaaaaatacaaaaattagctgggcatggtggcgggcgcctgtaatcccagctcttcgggaggctgaggcaggagaatcacttgaacccaggaggtggaggttgcagtgggctgagatcgcaccattgtgctccagcctgggcaacaagtgaaaaactcagtctcaaaaaaaaaaaaaaaaaaaaaaaaaaaaaaaaaaaaaaaaatttcaacagccttccaatataaaaagttaatagcaacaaaaaagataaaaggaatataagcttagcaaaaaatatacaaaatctatatgaagaaaatttaaaaacacctctgaggggcataaagtaaattttgaataaatggaaggatacaccctatttccagataagaggatgcaatagtacatataagctaattctctctaaatcactccataaacgtaatgtgatgctaataaaaatgccacaaatgtgtatatataaaataacatatataaccaaacaacctgatttgaaagttcatatggaaaaataaatgtacaaaaataaccaagacatttatgaaaaacatcagatgttaaaataatttaaagctacagcaattacaaataatgatactggcacatgaatagagattataatagcaaataaagttgagaatagaatcaaatagataacaaaatttagaaaataatataagggccattttatatcagcaagaaaaagatggtttaattcaaaagtcctgtgagaaaaaaataaagttaggaaaacaaagctggaattgtccttttaacagatgacataaaactcagaaaccttaaaataaaacactgatacgttttattacctaagaattttaaatttcagaatggaaaaataatacctaaacaaaaccaagagtcaaatgataacctggggagaaaatatgccacacctgagagaaagagctaatttccttaatttatatattttaaaaagccctgtaattcaatctttaaaaaaagaccaacttggccaggcacggtggctcacgcctgtaatctcagcactttgggaggctgaggtgggtggattacttgaggtcaggagttagagaccagcctggccaacatggtgaaaccctgtctctacagaaatacaaaaaaaattagccaggcgtggtggtgcatgcctgtaatcccagctactcaggaggctgagacaggagaatctcttgaacccaggaggtggaggttgcagtgagccgagatcgtgccatcgcactccagcctgggcgacagagcgagacttcatctcaaacaaaacaaaacaaaacaaaacaaaattcaaatagaaaaatgaataaagggccggatgtggtggctcatgcctgtaatcccagcactatgggaggccaaggcgggtggatcacttgaggtcagaagttcaagtccagcttggccaacatggtgaaaccccatctctactaaaactacaaaaattaggcgggcgtggtggtaggcatctgtaatcccagctgcttgggagcctgaggcaggagaactgcttgaatccgggaggtggaggtttcagtgagccgagattacgccactccactccaaccagggcaacagagcgagactctgtctcaaaaaaaaaaaaaaaaaaagaagaagaagaaacataaagcagctgagagcattggagggcatgggaaaactggaccttctacaccgctgctggagtgcacactggcatattccctttcaagtttaatgttggcattatctactaaaataaaaatgcacattccacttacagaaatttctcctatagaccatatgtgtgtgtaaagaggttgtagaatattttacagactgtagagtatttaagtggccttgtttgtagcaaaatactgaacataatataaattccaccaaccaataagagaatgagtcagtaattcacggtacatacatacatacaatgaaatgctaggcagtcatcaaaaagaacaaggtagcccaatatggtgctaattaaggagcccaaaacacatcaaagaaaccaaagcaaggcacagaacatcctgcataacaaagcaaccactcatgtatcaaaccaagcaaaacagaaaaacaaaaaacttcacaaaattggtaagaggaattacacatcctcaaatttgcttgatatgcagagaatttccccaggaggatatacaagagactggtaataaccaccatggcatcttgagaagcaaactgtgccactaagggaaagtgggaatagatgactttacttttcgctatatatatttttggtactctttgaaatttttaaaacatatatggtacattatatctaaaaagtattaataaaaaaaacagaagaaaccaaagtaatccgaaaaaggcccctaagccaatggtgccttgcacattcaaagtgctcaaagacactgaatgaatgaacaaaacaacgttactgccaaagctaagcacagagttaacagcaaattcaattacaagtatggttttcgtgttttgcataagaaacatttacccaaaagaagaaaaggatttggaattcaaaccagagttgtctgtactcaacatcgactttgtgagactacactgaacgcaggctaggaatggtaaatatgctagtacaacagcagcaacgtgccgctgtgtgacgttaggagattctgacatttcaaaaggtgttactacatagagaagaagaaagaaaaatcaattcctcacagggcacaagtaagtgagggaggatggatatgatgttaaaaaaaaaatcagagccaaaataactgaagagtgtgaacacagaaaagcagtccgttctcacgccatcaccaaagtaatttaaggatctgttgggtgccttaaatttgctgtgccctccagataagctttttacaggtcaaatcattttacaatgaactccaagggactatattattacttgaaataagtgaattaaattgaggcttggaaaactgtgtttctacagaatattccagtctttaatagaatgaccgacctgttcgtgattttttaaaatattgcagcaagtaaaatatgacatataaccaatcaaatcactgcccctccaactagccacatgaccacgttgctgacgatggctaaagcatgatgtcaccatgcactgcccgtcgggtctcaacactgcacatgcattagctcaaccctgatcccagcccttggagacaggcactgaccgctaccatccctgtgccacagcaaaggcactgaggcacagaggatgaacaatttgcctcaagttaccctcagacccaggattgagcacagctgcccaccacaccattcccctgatatgtatgtcatcaaatctctctcatcctccagtcatggatctatgaaattagagttaggctagaactgtataagccattccagctcaaatagtccaaactcttcaactggtataaagaaaaacctctccactggcaagatgctctcctggagtacgtaagtggatgagactttactacatgattgtagtaatttacatttatttttctctatgtgccagggacaatgctaagcactttacacaaattctctcaccgtaaagcacttaatagggggaaaaaaatcagttacctttaggaagtaaaattcctcactcagagaaaaccaatgttaacagtttgctaagaattattccagcctttttatgcatgcatacacaactattacttatgaaactggggtcacactatacacatcattttgtaacctgccctttttcaagtaacaaagcaagaatatttgctcaagttcacaaatagtaattgaaaaagtatcattttttaatggctatacttggttccatctctggatgattttgtagggtttaactgatttttaaaaattctgaacctattcattttgaatgaattcaggcttataatttcagacttacaaaattttgcataaaaaaatacaaggaatttccacacacccttctctcagcttctccatatgtattatcaacactttcatccactcattttagcatctatgataactcacgcctgaaacaatactactgtggcatttgccaaatggtgactttctatttctatcatttgtatatttatttattagagttctacataaagaagaattctaccttctccctcatttatttattcaataatttatttgtatcagtttgaactcacggatattttgttttagtttatagactgtaatgcaacactattattgtcactcaaatatcaggtaggctagatatactgctaattctgcatatccaaactgagaaaaacagtaatcgattagcttttgtctgttttttgcagtcacctcactttctatttctggtctcaccactccctctcagctgagaataacgaggctgtatttgtaggatcctgggctggcgtttgagatgaagcctctgcccacggatcacagcagttaactggcctcctagggaactcaacccaggcactaacttaacatgtttcacaactaaagataaattctacataatctcaaaaatgaggtagcccaatttgtcctcatattaacatttcagctaaatggctgcttattttcatatttactgttcatgagaaaccactgttttaaatatgaagttcagccttcttggtcaaaagcaaacaccacattggaacttagaaggttaaaatataatgctttatatacaacacagactcaagcatgaatggatagctgcaaaaccaaatcacctttattgagtgaccattctgtaaaaggtcccacgttaggtactgtggaagacacagatgcatggcccctacatagcacaggagccaggaattaaccttcactgtaagtcttcacacaagagtaaggagcttggtctctgcagccaaacagaactgaggtagaaatccagttcctccattacttgctgcatggccttggttatttaactttcctaagcctctgttcttcttcgtaaaatgtggataacagtaatacctataacacagtgggggagagagcagttaaagattcaagaagggaacacatgcaaagtatcatgcctgacacacggggagcatcttacaaagcttccctgttacacttactatgacaattgtgaagtgtatttattctactctaggcacagtctctagatacaacacatttatgcaataaataaattaaaaggaggtgaaaaaaatactcagtgaaaacagattcttttagtcctaatatttctgttatgcttcagtttgatggttgcttatgcactatgagcaatgacagaaaaacacatttgatacacacctgtatttttgactccattgcttgaagggactggaccacagggatgcaataggcaagagttttacctttcaaaaaaaaagcagaagcaattaaaatcacacaccctacagatgtttaagaaaagcaaaggatgtaaaggaaacaggctctgctatcttccagtagtactaaattctagggaaagggaaactgcccattatacatccaagagaagtgaaaagggacttcccctgtctgccacaaatcccaattttgctttgtaaaatgagtacttctaaaaaactagaagcttcagttcctttattcatctaacaagagataacgatatgtctcccaaattacacagaagctcaacttgatggctgtctgtaggagccagaaaattcctcctttgaagtcctccctaccctctcagatgagcttcagtggtcaattacatctctgcagtgctgatgtgattgggagccagtctgtactctagagctaatctctaattgcagagaaaccaacagatggcaaaaactttgggtatccagccttctgaatggtggccgagctggtgggagtaaaggatagctgactgcccactgagggcacatgagggtcaaaaaagcaagtccagactggcctggaacacggcagaaacagtgttctgtcctcgagcacaactggcatctgatcagtgtacgctcaggccagaaatcactctgtgtttaacaccagaagaagacattcattctccactagagtgagaatgggcaactgtggccaccacaccttggtaaagccccgaaataggctctgaggaaattatagccgaacctgactacttcctaatcatttctcatcgtggtaccatcaactgtccccttcctttcattatgtgaacacattcagggctctaatcaaaagcatggcctccctcccccaaacgaaacaaaactgccaccaccaccaacccagacaccgcatggcaaaacctagtgcatgaccatgggcctgagcagatgaaaaagggcagagatgaaatgagactaacctgagcccgtctgggatctcacgagagcatctctgccttccagcaacacaggaatactttgcttctgaacactgggccacccgaaaaaaagaacacactttacctatattacccagttactggcagagacgcaggatacataaaaggcaactgcccacacttggattcatctggcaactgcctccttagaagctatcaaagcattcaaataaaggtgtgaagaaacttttgatgattataaagatcaaaccctagttatatttttagaacttagcctgaaaatggtgaggcaaaccagagactggccattctattaaactaattcttttaaaaatgggacaggcagccgactgcagtggctcacacctgtaatccctgcactttgggaagctgaggtgggtggatcacctgaggtaaggagtttgaccagcctggccaacatgatgaaaccccatctctactaaaaatacaaaaaattagctgggagtgatggcacgcacttgtaatcccagctactcaggaggttgaggcaggagaatcgcttgaacctgggaggcagagattgtagtgagccaagatcgcaccactgcactccagcctgggcaacaagagcaaaactccgtctcaaaaaaaaaaaaaaaaagaaaaagaaacaggcatgacaacaaatcagagttaccaccaagtgtatcacacactcttgccctcactaacaggaatatgaaacacaacgaaacataatggaaaggtttccatgcaggatagcaggaggaagctcgccaactattcagagagccagcagcagctgtccattctccaggaaaaggttatggacatgctgaaatgtgtgtctacacatgtattttaaaacaagaaacaaaagagacacaaaaatcacttaaatttggttgataaaaaacttgtggggaggtcccttaatttggactttaatattcctattaatttttactagtaaaagtaaaaaatcattatgaaaatgcacagaagcacaaatactcaaaacaaggaagctcatctcctcgcacctattttacttctttattttccaggagtcattccctgtaacaaacattgaaaacattttttcagtatcccactctatccaactgaacatttactcttgtctttttggttgaccctaattcttactactaagaaacgacatggtcacatgctatattttggccaaattcttttcagggaagcacagaaaacagcggcgctcatgcagcccaccttctggatgagacgtctcttgcggttcagagccaagggcagaactggatggaaagccagtctttccatttaacaggtggagagaatgagtagctaagtgagacgacaaccctttatggtcgataacctggcactgtgttccaacgccaagacacaaatttgctctgccttgcacacacaggtttcgtccggttatacccacgtaatgcctaagaaatcaagaggagcctgaagttcttacctggtcatactagacatttttaagaccgtatttattgtggaaatctaaaagaggagatgaaaaagctttaattaatattttgatacaaaatatttaacggaaattacacaagaaaggagaaactattgagagaacattgactactatgatcaaattaagttcctccacccaggtggtgctctctacttggggcgattctgccacccgccctaactccctggggacacagggcaaagtctggaaaaatttgtgcttgttataaccaggggaggggggcactgctggcatctagtgggtagaggcctgggatgctgctgaacatcctacagtgcacaggacagtccccaaaactaagactgacctagtccaaaatgtccacagcaccaaggctgagaaaccctgatccaccccccaggtgagaaaacaagtttaggtaacccaccctacagaaggggtagtaagctgtaaccgaaagtgcagaggaaaccaagcctgcctaaaagttaatatatttttttcttcttactcatgagtctggagaactcactttttttcctttaaagtgtccatttgtttgtagaacacacaccaaaatactcttcttcccttacttctctaaaactgtggacgtcctttaacagcaagatgccagcacagttccctctcctatggccactgtgacatctgccaccacaaatggcttcaccactacaactatccagtaaatagggagctgttttaagtttagcaagtgatgtcctgaccctaaatcacgttagtcgaggaaagtcttcaatacttaaaaaaacacacacacaaaaacacaaaaaaacagaggatgggggaagggggggccagaaaacagtgaacagtaacctaagcacccttgaactgtcctagaagagtatcatatcaatctgagttcattcaggtaacttagagcagaaacaaacactctctgatctctcctcctagagcggccatttcacagaccttctgaacggacaaacacaccaaaaaaaactgacccagaaaacactgaaaggtacttactaaatgtgggtggaggcccagctcatgaaaagcagctgaagtaaacactttttcttgcacctgctttaccacaggtctgcaaatgatgaacaagaacccaggcatcagtgccaatattaacaaagaaaaggcagaacacatttttttcttcctgaagggcatccgcccctggacatacctgtggagttctggaatgtcagggttgtttttaaacagtgatgaagtcttaatgcactgtctctcctcctggtttctatcacttgtgctaaccgaatgcttctttggagaaaacattttttgtgcgttccccttaaaagtcctctgagtttctttaacactagttttcttggctgggagaaatgaagtttcgttcctccgtttcgctgggggagcctcactggacgcttggtattttcttttcgtagcctttgcttgctgcgttgttcccagaaggaaagatcaacaagagatgcattagtccatgaaaacagagctcggagtgaagcctgactgcccacagaattgcatctctccctgcagagatcattatgccccatatgtcaagcaacagtttagggtttgcaatcagactctttgactcagcttcttccaaaaggtaaagaaaagaaaaaagaaaaaagtctcagctcactcatctaccagacctcaccagccattcttaactgttaaatcaatcaagataaggtaaggatgaagaagcagcatttttccagttgaatgttaactaatggagtctgttttaagggaagcaagaatccaccttgtgaagggtgtgtcaatccatattcctaggaacccattcacccaaggagaaaagaggggtgggggaaaacgaatcttttctctccaccaacaaagcacactggagaccgcacaggagagaggggcgagggggaatgcgcatctcagcccgtgcccaggaagcggaaacattcattaccattctaccctagcgcctggatctctctcattctctcctctcaagctgctcctccagattcagacggcctggagaaaattcctacgccctgttcccattccaaatgagaatgctgctccatccatcacctctaccacaattacttcctacctcccttgcctttcgagtctctgagtccccgagtctctgcctgattgcggattacaggctacacagcactagggatctcttgcctgttgcttcttatttccattacaggaatgtgcttaaatgcatgatgtccaaacttcccctaggagaaggaacatccaattcctctattttctttggccttcttttctgatttacaaatgaatataaaagcatcccttgagtagccagtgcttgttattctggagttttgggttctctcagaatatgttattttcctctttgcttgaaataatgacttggttttacatgtcggctttctttagccatgactgtcagcttcagactaacctaccaataacaacagttctttgttccctaaggattcttttacctaagtaattaaatacaacttcaaatatctaatattaataaagtaaaaacggacatattccatcttacaaatttattttttacaaaatctcaagtttatgaattttcagattaaagaaagagatgaaatcaagtttcaggtttgttgaatcatttgcaagacagtatgaaatgtgcagacttcacctgatttacagacccaggactcctggagcacaaaaactcttaaaggccactcccgccatacatggacttcctgacagtcccgggcaggtggactggcagcctctccctgcacacctcctgcatcccatgaggcagcccattctgttcatgacccattctaggaatcaggaagctgtctctgacatttatgcaagatctgcatccttgaacatctacctaatagtctgaggtatactttctgcagcaacacagaacaagcttacttcctcttaacacataacattccttcatatatcacataactctcttttctttcttctttggactcaatatttcaaacaggacacaactttagatcctttatcatcttggtcaccctttattcctatgtcaacatctctctaaaagcaagtactcagagttaaacccattaggttttccattgctcttaggctgaactaaaaaatctgtaatattgccaggtgccatggatcatgcctgtaatcccagcactttgtgaggctgaggtgagctgattgcttgaggccaggagttcgagaccagcctgggcaatatggtgaaaccctgtctctacaaaaaaatacaaaaattagctgggcatggtggtgcatgtctgtagtcccagctacctggaggctaagttgggggcatcacctgagcccgggaggtcaaggctggattgagtcgtgatgacgccatgatgccactgctctccagcctgggtgacagagtaagaccctcgctcaaaaaaaaaaaaaaaaaaaaactgtaatatgatcaacaaagccttctagaatctgacctctggccacctcaccagcttcagctttactctctgccactcgggtcttccttcagttcctagaatgtgctgtgctccttcctcctcctttgcacatgctactcccacatccaggactccactctgccctctggctggccaccctgtactcatccttcagatggaggctgaccaactccttcctcagaagagcctttcctgacctctcttcacccagtcaagccaaggtgctctgttcttggctctcctggcacccgtattctcctccatagcattcgacaaaataataagcatagcacggaactcgttgttttatgtctgtctttcccgttagattgtaagctccacaagaaaggggccagtctgtcctacatagcactgtatcccctgtataggcccctgtctggcagagtaagcactcaacaaatacttgtaagatgaatgaataacacacaatggaattatccctttccaccagctggatacggttctactacttgttagcttttctcccccagcatccaaaacacattcatttagcagttgtcaagaagcttcgttctgaagatacaaagtagatttgccaagcccttgaggaagttacacactagcagaggagacaaaagtataaaggcataaatccaacctctacattggtgctacagaagaggtacataaaaaaggctatgagagcaccaacaaaagctagactaacatggcctccttctggcaaaggagagggaggcaagaaaaccaagaatgcttcgtgaggtagcctctgagcagagagggagcaaggacatatctgaatctactaaaaattactactaaaaatctaaaatctactaaaaatctactaaaaaattcgtttgagtctctgttgccgcacctgtaaaatgaggggattttggcagatgacctctagggcccatcaagacctgagagtctaagatgccatggctttgatattaataaacatactgagtagttactatatgccaaggagtatactaagtactcacatgtattctctcatttatcaacacaggtactgttatcatctcattttaagatgcaaacatggaggcagagatgtgacgtaatttgtcccagaatcactgaaggaaccaggctttccccaggcatcatgattctacattctagaggcctcacaacaatactataatcccttttattaactgcatcctctttgctttagaaaacatgtgtatgctggaaacttactctttctgctcaacattatagttttgccttgtatagtcttaatccacatggatttggttttttatacatagtgcgagataaggttccaatttcagtttttaaattcacacaaccacacaaccaattgttccagtgccacttattaaaaatgtcagcttttcctaagcaatttgcagtgtcatctcggtcatgaataaaatttccatttttgtattggtctgcttctgggctctcttttctcctttgctggtcaatttgtacagttttgcaccttattccagactgtctgaagaaatagagcttcataataattcttaatttttgataagttaaaaaaaaaaaagaaaacatcatgtgtagtgattccaattttgagttgttctctaaaaggacatacaccaaaatggcaacaagcattgtctgagtatggcaattatgagtgggtttttaaaaatcttttttcctaattttctataataaatttgtattaatatcagaaatttttttttgttttgcttttgttttgagacagtctcacactgtcaccccagctggagtgcagtgatctctgctcactgcaacctccactggttcctgggttcaagtgattctcgtgcctcagcctcccgagtggctgggatcacaggcacccaccaccacacccagctatttttgtgtttgttttttgtttttgttttttttttttgagacagagtctcgctctgtcgcccaggctggagtgcagtggcgcaatctcggctcactgcaagctccgcctcctgggttcacagcattgtcctgcctcagcctcccgagtggcttggactatagtcacccaccaccagccaccacacccggctaattttttgtatttttaatagagacggggtttcactgtgttagccaggatggtctcgatctcctgacctcgtgatccaccggcctcggcctcccaaagtgctgggattacaggcgtgagccactgcgccaagccttttttttgtatttttagtagagatggggtttcaccgtgttggccaggctggtctccaactcctgacctcaagtgatctgcctgcctcggcctcccaaagtgatgagattacaggtgtgagccacctcgcccagcccagaaagtatttttagagagaaaatttctgcatagtgttagatacagcataatttaagctgttagtctttctaaatccagtatattagctacccatctcaagttcaggctactggcaagtctcatcagcatatccatcattctcattcacgacatcaatgaaaatgtagatctaggcctggctggctcacgcctgtaatcccagcactgtgggaggccgaggtgggcagatcacaaggtcgggagatggagaccatcctggctaacacacagtgaaaccccatctctattaaaaattcaaaaaaattagccgggtgtggtggtgggcacctgtagtcccagctactcaagaggctgaggcaggagaatggtgtgaactcaggaggcagagcttgcagtgagcagagatcgcgccactgcactccagcctgggagacagagcgagactccatctcaaaaaaacaaaacaaaacaaaacaaaaaacgtagatctagacaaggccaccgcagacacctgtcatcactgcattaattaatccccttttgataaccataaaactaggtagcctatatgtatttactcaatgcttcttatgtgttagttaccaggctctgcagaggacacaagcaccccactgacctcctgatgtagcaatctattatccaaaatggagccaaaactactttatactgttggcatttattaagtgcttctatgggccagacaacgtatagtcttcatgtatactatctcaatgaatccttacaatagtcttctatggagtagaaattattgttctcattttatagataggaaaagtgagaatcagaaagattaagtgacttgctccaaggtcacagagctagtgtgcagcaagggcagcatccgaatcccaagtgtatcctattccaaatcccatgctcccagtggctcttctatccttctccccgctccacccagatgcagctacacttggctagctggactccttactgccaaacatctaaatcctaaagtttgatgatcactttatgattttaatcagtctttctgtcctgtagtcctcttttctaagagacaaatcaactatcctagaaaccagttttcagttactgcttaagttaattctagggcatcttacccctctctagcaatgggattatatcaatgaaaccgattttcctatccccctccattgcatggggatgaaaatctgtcccatttttgaaagctcttcaaaaaaactcctagttgccagtcctcattcctgaaacaaacgaaccttcctcatggcgaccaaaagagttaaactcaaaaatatctgaagagacttattctgagccaagtatgagtgaccatggcccatgatccagccctcgagaggtcctgagaacatgtgcccaaggtggtcggggtgcagcttttttttttttttttgagacggagtctcgttctgttgcccaggctggagtgcaatggcatgatctcggctcactgcaagctccgcctcctgggttcacgccattctcctgcctcagcctcccgagtagctgggactacaggcgcccaccaccacgcccagctaattttttgtatttttagtagagacgggggtttcatcttgttagccaggatggtctcgatctcctgacctcgtgatccgcctgcctcggcctcccaaagtgctgggattacaggcgtgagccaccgcgcccggccgcggcttggttttatacattctagagaggcatgagacatcaaatacatttcagaaatacactggttttgtccagaaaggtgggacaactcaaagcgggggcttccaggctataggtaaatttaaacattttctagttgacggttgagtttgtctaaacacctgggatggatacaaagaaaatgctcaggttaagataaaagattgtggagaccaaggttcttttcaagtctttagtggctgcccttagagacaacagacaagtgtttcctattcagatctttgaaaggtggtagactcttaatctctttaggattgggagggcctggaagaaaaagatctagctatgttaatagagattctttgcagatgcaaatgtccaccccgcccgccccccccaaagaacagctttgcaaagccatttcaaaatgtggcaaagaaacatgtttaggggtaatattttaactttcttctttgtcacataatgttaggccagagccagtttggaaagtaagtcacgatatatagggttaaatgaaagccatctgatgagaatttatggtttgtagggcatgactcttcccagacaggaatgtgggcaagataaaaaaaaaaatcagagcttagtccgcactcagtcgaggaaactggcttagagaagttaagctttggcctgggacttgcgccggaacttcaggtcctaccttccacgggaaacagcctctaattccttcctttacttttctaggcgcaggagccagctccccgcccctccacaccgctccactccccgcttccaggcgcatccctgcgggtggtgttccggttagagacacgtgtttcggcgcaacttgtcccgaagctgcccggtgtctttctcccgcttaactccgtgaatgactcgaaacccgactccaaggcacggctgcagctcgcggcgcgcccacagccgggccgcgggtggggacggagctgaagccgggtcagaactcacccgactcgcctgggctgggggacgtctggagaacgtcctggggttgtcgaagagcgaaccgtcggcggctgccatggtctgcgtgggtgacgcgtggtgcagcagcgagcccggtgcgcagactgctgggcccgggaccccacgtgggacgcgcgaggaccctgcgccaccgccccttccgggtccggaacggctccagctgtacggactcgtcccgaggggagccggggacggcggcaccgggcgggtagggacaagactaccgcgcgtgcccccgcctggtggcagcccctctctgcgtccctcgcggcctggcaaaattacattcggccgagagttcacgctggggaagctctctgaatgcctctgagaagcgagatccggcgccatctcaccgacgagcctcccctttaccgccccgtgcgtttcctcagcactttaggaactaaagcctgtctgggtagctccctaacaggctctggagctcaatccctgggcagggaaaagggggtcctcggggctccccgctcgctgtcctttttctggacaggcagttccttggccacctggtagggccgcgttgcctggcaacggcggggtccttcttggctcggcggcgctcggggcctgaggggagaaaaccgccgcggagggcgctgggggtggcggcggcggtccgggaggtggtcgcgcgactgcgtggagcgccagggcgtccgacctctgcacctgagagaagatgaacacggccgaccaggcccgggtggggcccgcggacgacgggcctgcgccgtctggggaggaggagggagaggggggcggcgaggcgggcgggaaggagccagcagcggacgcggccccggggcccagcgctgcattccgcctcatggtgactcggcgggagccggccgtgaagctgcagtatgcggtgagcggcctggaaccgctggcttggtccgaggaccaccgcgtgtctgtgtccacggcccgcagcatcgctgtgctggagctcatctgcgacgtgcacaacccgggccaggacctggttatccaccgcacctcggtgcccgcaccgctcaacagctgtctcctcaaagtaagtcatcccccgccatccctggggtcttcccctgtccccctctcgcggccgcatcatccgtcccaggggaatccgatcccacactctgtccggggatttccctcttcgcaccgagcgctggggatttattaagcagccagggttaccacagcttaaaaaaaaaaaaagaaaagctctgcagctgtctgcaccctgtttccccaggtcacccgccgccgcaaacacaggtacacacccagggggcttcccggagttgagtcccaggaacccctccttcgcccctccgtcgggcccgcacatggagcgggttactcgatggtgctttctgagactccaccccctgtagatccaacccggggcctgcctctgtcgttgctgctattgtttggggccgactttccgaggttcttggctggctttgtctactgtgtgtgtcctcctctcgcgcctctttagcttcagaaaagaaaaactggtcccatccattgtcttaattgtttcagtgactttattatgaatggtcctcgcctctccttgggcaaacgggtaaatactggatctcggggtttgtactttagtttttctttactagctaaacatctttgggatgttgaatgaaaataaagattcgaaacaactacctatcttaaacttcaagcgcaaggtcaagtagtaagccatagcgttccttttagttgcttagaggtgtaaaaactttccatatatccttgatagaggtgtacgcttacatgtgaactgtcagtgtatattcatacattcaatagatatttgaataccattctgcttggtgctgccccatgttctggaaataaagcagtgtacaaaacagaacccctgccctcatgaagcttacattctttggcaagtcaagcacaaatgataaggtcctgtcaggtagtgataagcactgtaaagatgtgta

SEQ ID NO: 146 - DNA, 48425 bp, Homo sapiens
  source 1..48425: mol_type = genomic DNA
tatgccttgtttcaaactttgttttcttgattcaggctttctttcctgtgagggcttggtttccttattgttgactgctttgttctttgccttgtccttccctataaagcctgcatggaagacgtttaatagtgcaactaaaagagagtcagctgagtgaggcttgtcagccaaagctggaatgctgagctatctggaggagatcctaataacccaatttggggatggggcccaggaatctgcattgggaagtcggccacccttcccaggtgattgtttagtacaaactttttgacagattaatttcactcaaatgcaaagattaatcccagcactttgggaggccaaggaaggtggatcacctgaggtcaggagctcgagaccagcctggccaacgtggtgaaatcccatctctactaaaaatacaaaaattagctgggcatggtggcatgtgcctgtagtcccagctactctggaggctgaggcaggagaatcgcttgaacccgggaggcagaggttgcagtgagccgggatcgcaccactctgcactccagcctgggtgacagagcaagactccgtctcaaaaaaaaaaaaaaaaaaaaaaaaccgtagttgctttctattaagatagggttttaaataaagcttttttcctttccctcacagctgttttgcacatatctggatgcagttatatttcctaagtgccagtgcttcacatatgtaactgatgcatcagttctcacaacaaccctaggaagtagctacaggttgagcatccctaatctgaaaaggcgaaatctgaaatgctccaaaatccgaaagtttttgagtgccaccatgatccttaaaggaagtgcccagtggaacattttggattttggatttataatgcaaagattctaaaatcctaaaacatctgaaatctgaaaatacttctaagtcccaagcatttcgaataagggatactcagcctgtaataatatatggttacatagcacagaaaataggaacctgactttgaatccaggccatttgatttacagagccaccgatagcaatgtactctataccggttctaaatacatactgtaactccccaagaggttaaaaatgaaataaaagtttagaatatacacatataccaaatatatatcaagtacataaagttttaaactgaactttgataagagagtttgtaaagtaaaagggtggtggtctctgtgggattctagaagtttcctgatgtaattaagggtacacagccctggctcttctgggtggcgcagttattcccaactttgtttcccattacctggagaaagtttgtccagaccgtggcttctagaaggacaggtagcagctccccaatctcctccatcatcactgtaagtgaagtcaggttcagcccccacaggctctgctcatggagtaggccaccattccttcctaccacaaaccacatttctcggactggagaagggattgcagcacgcacgttcatgttaaaatgtgaactttaattgtaaaaatcattttctgtaaatatagttatatcaacctctctgcacacaacttggttcagatatatacagatatgatattcatagatgttatttgtaccacagaacaaaatcaattcaagaaacatttacttttagcttcaggattaaccccagctttctttaggccttaaaattaccaccactggaaacagagagagagcacggcatacctgggcacaccagtattcagggcaaaatctatgcagtgtcttactaatttcatactatgaggtaaagacccgaaacaaaaatagattcagtctctcgtattgctataactcttaggctggggtattaatcaaaataggatttttacatttaaggcgacagggaggctatgctgattctaactcagaaagaaatgggaaaacagtttttctaaggctacaactatttgtttaggcttattttcccggacctatacaaaaattcagtcaacaagttttgggtaaataaaggaaattcattttgctttcctctgctctgtccctgaagtcactcatccaggttggctgctcaaacaccaagaatctccaccattcttcacttgacagtctttgtggacacgttagacccaaacttttttttgtataacaccatcttaaaattttttagtatactttatctttctttagtttacccaaaggaaggagttttcactctaatgtcaatatatttgcaaccatccaactcaaagacctctgtgtcgactgttcactttgtggatcatctctggctcatttaaaacatcctgcctcatccccacattcgctgactggccttagaaagcaaagtaaatttattgttagtctaaataagcattctatagcaaacataagtaattcacacctggcctactatgaaaattaaattttctgaatttagatcatattagctctaaaagccccacagtatgctaaaaatcgaaaataaattctaaaaagaggaaagcaaggcttttgtctccatcatcatttctttatatagcactagaaaattcttattccccttctaaatttgcaatttcatccaactgcccctaaattctagttccaaaaacaaattaaagtgccagttataacactacctcccactcccacctctctcaagaaagaggcctaaaaataagaatgatgacatttacccttttttgtactagagctttactgaaggttggtatttttatgtcaaccttcctaggactgtcaagtctgcctcctaaagagcgctgtcaggatttcatagcacaatctccttattcactctccaaattatttacatagtaaaacttctatggggtctcagccaccaccaaattacaaaactgcccatttcttctagaataatagttttaaaatttccttccatttcagtatatgcatactcagttcatcacatagtaatatcaataaaaaaataaacttccatttcttataagaaaaacattaacttaattcacagttagccttttcccacaacactcaatactccagtagcttctaggaagagaggtatattagtgataaaaatggaatattaaaaatccatgacttgggagtaaacggagcccttaactcctcctctccccctacctgaatcacaaaagggttttcctgaaatgagaggggatgggactggggtcagcaggattctcacctcggtctaactacaaggtacggggagaagacaggagggctggccatttggcagaatccaagcctactagcttgggatctactagggagataaaagcccatgcctggcatattggtccccattctaattgtcttgcccatgttagacctgtcatcacactaaggcaagtccactgccaagctgagcattatcctattttattcatccacctgcccctcctcctttacctctgcaaggttgacctatacagggtctggagaaagcatctcaatccattccctgggctatacagtttcgaagggaaataaatggtccctcgggtttctgccttttctcggagggttgatgtcctaaaactgaaagcctaattcattactgtcctttacaaaagcttccctgaaggcctcagtttaaagatgagtgatttcatcttttactgtgtttgaagggctttcagtgcatcaagactgagagcaaattcatcctcatagccaccagaaggaaaaacaatgatttagctaagatttaatttatcttctagctaaagtgtcatcggtagtcacatgatcaacaaatgttcacatgtggcatctggaagcatgtgcacctgtgtgctatcttaactttcttgtcttgactttaaagtggaacaaaacaaggtaagttatagatgcaagttcctaagctaaattacttctattgatacatcaatgatttcagcttccctccccctaaccaggtggaagcacagatgctataatggatgatggatatggaaggcaaaagccttctaattcattgcaatcataatttactgaggactgtacaggtcccaggtgggacactgacactggaatggtctctaccaggcatagggaatggttcgtgtttaaaggccaagcaaattctaaacacataatttgggccatacttttagtctggtaggggataagccctaccatttcaaactccttgtggagagtcctaagccaggggccaactggacattttcccaaaggctgggcagtatcatctgctgagcctacagaattgaaaatgccctcttgaacaggcctttgtcatattttgcatggataccaacgagccccaaacctgaattccactcccacctggaacttcttctgacttattcaggaacaacagggcagcccagccagcatctcaggtcagcaatcatttccaaactggcacatagttcatttcacagtgtggcatgagatcaggctgacagcttcacaggagaactaggcctgctcaggcaggcgagggctgaggcccggcaggagatggtggcagaaggtgtcacaccacaggtatccaaccctcctccaggaggccggtggtcatcataatgcccgcccctaaagagcttacagacctagaagtctgtgaacgatgttcagcactttcttctgaacaaaagcagatggtttctcagaaaatatttcaagactggcagaaaagcaggtccacatggctcctagcttctgctgccactgtggaattccctagtagagaactggtagcaaaggatcctaggttgtgcctgttaatctgtcatgttggggagcagaatctggcatagagcaaggcttcgaaaggtgatttccgaagccacaggctccacttcatagcccaggcaagacatactctgaggatgctcaacagtggcaaaggtaactgaagagataaagcacacgctgttcagccaagcagaggctctgcacaagatttctggtcctatgaagaagctggcaaggtagggaaggaccaatttattggaatctctcttaaagggagaagttctgcattggggtcagctgagcccaaggcccctatgacctgaaacatggcactgcctcactggcacgttctcctctggggccacccataccctggccctctgcatgagcaggagggtggacacgtggagatgtgagacagaaagctaccgagacaagcacaaagttaagggaacccagaagccctgactcaccattcaaaggaaaaaacaggaacttcattctcaccctgctatgtttacaccagcacttctgagcttgcagttaaaactgcagtgtttgcatatagaaggctcagagcagaaatgcctcaaacagctccttccggcagattccctaattccagaaaaaggaggtcttcttgtgtcctctaggagaatcagacctttcctttcacttctactcctgcctctaaccacctacccccagcttaaaacaccctgaacctcaggataccacgaaaaataaccattacttgacagaaaggacccctcaacccttgagaggcaagaagagagggttgcatgtaaaggagaataaaaggtgaggcttcaacctcgaaacacagatttttttttcttttgtaaacatacacattactgaaatgacagcaacccacattgcagaggagaaaagtctattagctgtacagtttacatttcaatgcccaaacttatttatatatttacataaagatgctaccttgattaatcaatgtctatttgcatttccacatgtgaatttcttcagttttgatattccatatgaaggagctacagtgaaaacacttttgaataaagcagtgaaccctaagaatcttatcttgagatgagatgtgtgaaccaccatttgaatgttatttctccctgctgtgtacattagtctggctgggtgttggtcacagacatggatgcactgacggctattcccataaccgagccaggcgggaagggggaaaaggaagacattatttgtcaccaacaacccagtatcccaagtcaaaattctcaactatggccaaaaaggcctaaactcgacccacaggaactggctttctaactggttgacaaacacgtaagctgccctcctgcaaaagccaaccagagaacaggcaggtggcaacaggacccagcctagagcagagcacttcagaagaggatggataaatccatcagggatgctcagggcttcctgaccactgtcccgggtgaaggcactgccacattttctctcaacaaatctgttatgtccctggatccaattatttagcctaaggaatgtcacctctgctaaagagaagtgtgtttgtgaggggtccaaaatgataaaccgtcttgttagcatcatgctccaccctctgagttaaccagctcagatccttgctagattttggaatccagtaaatctgtgttgacccagaggtgctgctgctaatgcctccagagaattcgtgtccagatgaagagacttagagtggcttctccatcctgctcgaacttcaattgctctatcctccggtagtccaaacttcagcctttaaaaatacccaacttactccaagagcattattgaacccttaagagactaaactggaaaattaatttgcttgcaagctccaaggccagcattggcccttagcaattcaccaattcatcccaagaagaggaaggttcagacaaagaggaacattacattgcatggccaccatcaagttactttgaggaaggtttccaggcttcattctataattttagttttcagctcactgataagcaacctctttcattctgaccataagataagctcatatttggtgtcagaaacatccttttttccctctttgtggtccctactcaagtaaacagagaagacataaagttgccctaatgaacaagaaaagggatttgatcccaagactatagactcctagaactactaaaaaccttaaaagatcatctggtctagtttctgcctttaggcagatgaacatctaaggccacaggggacaggtggttgtcttattctcaaatacatcaagggacaaagaccacacagactttctgaacagtccatcccaatgtttccagagctcagcctactcctagtgatacaactcccatgaccaagcccagaggaccagcagctctgggagaaagtggcagattccaatatcctaacatggcaggacacaaaaccaaggtgatctcaccttatctctagggaaaagggcagaaaggaaattgcaaaaattatgtttgttggaaagtataaacaatattcctttgtgtcaacttaataaaaaatgaggccctctggggccctggggtgaactccgggctgctgacatcccacgtgaagtggctcccagtcctgttggctcctcctacgggcaacaggggttgtcgataaccagcatgacatcaatgccataggcctccagcaggtccaggagaaagctccggtctccttgggggtctaggcccatgccccgggcatgctctgctgtcagagttttgtcttgactggcagacacctccaacaaagtctgaaatatccggttgttttgttctaggaaaaacctgcatttggaagacaagacacaggaaaggaagcgggggggaataaaaagctcaccagataatccacatatggggaaccaaaactatactgttttgtttaatgtacttttcagtggattcgcaggtatcttttaaaaaaagaaaagagtaaaagttaattattcaagtgctactaaggttagcaaagaaaccatttggcattaattatggtgtgattagggaaatctctaagcaagatggcctgtcaaaatccattttcctgttgagggaagtgacctgggtttaaacacagcctgagaagaggcccccaaacactgcttttctctctttctgcttagtcataggaggaagcaaaaattcaacaacaacaacaaaatgaacgtgagccaacgttacccttgggtgtttgctctcccttgatgactctttgggaggagtgagattatgcacagatcaagatttaaaagtcactgctttagagtgctttatgaacaaacaagctctgttcaggacagggttcactgcctagttagactagacagtccagccccatacagctctcaggttggcaaagtgcctggtgcctgaagcggccctcggtgctcaggaatttcagacacagtggcacatgtcatacctggatgagactatggctgtgctcaagtctcagatactttccacctaaacaggatgtaggttttagaagtccactattagaatcaaggtgctacacctttgtagaaatgcccacattaagttttcagcatcaaaccacaacctcacccctggaagaccaaacaggaagctgggagaattcagttgatgccacagaaggctacttcacccagctgtctaggaatgaaatcagtactgtgaggtggaaaggccctggcttctgcacctacggggcaaagagatttcatttgattcaagaattaaaatttcagattatcccataatattcagcgcaaggaactactctattcaaaggaggcaatggaaatgagaagtccctgagtcctgagggacagacagagcttccaggcagtggacatcctcgatgtaaaagcccaacaaggaaagaaacactaagactcctgttttctcttaagggacctgcttctttccctaagtcttctgggttccccctaatggcatttcagggctcaggtttgcctctgtaaggagcccggctctaagtgcccttggcagcaataaacggcatccctggcccgcagtgaatgacatgggagggatgcaggtcactcagtgccgaagggatcctcagggagactccacatccacggccccaggactcacagcacgaagaggtcctcttcacaagggttgtagtcttcttctacttcctgggagtacaacagcatctgcctgttgggaagatcaccgtgagactctggtgcaggtaccaggaccgcagtcacaggtgaggcctcagccaggcatcttcaatgggccaccacctcccaggaagcagcaccagccaggaaagggatcaacagggtttggactcaaaatccctggggtccagggccagttctgcccctggtaatcttaggcaagtaacaatctcctagttgtctatcagaaggggatgatgatgatgatgatacttatttcacaggatcaccagattattgacaatgacatcagatacatataagcaagcttctaatacggcgaccaacacaatgaaggtgctcagtcaaggtgcttctaagccgcacacacaggtacatctaaaggtcacgtggagagcagctggcagctaaggtaatttccacagattccaaagtccatgagaagaaataaaccagcaccgtggatctactcccctcctatcagggcagcatacagggagcctggcctcttctactgcggggcttcccttcatttccatctccatcccaggcagcatggagactgggagaaatgtgtcagggaaggggcagaagacaggctttgcagagacccccatgctggagctgccctgaggagggtggagcccctggttctccccttagctgccactacctctgctcgttgagccggcggtacttctccctgtcagcactgttgatcttcagcagcggctgcaggtggtcgtggtgtgtcttcacattctggttatccacgtagacgtcatacagctcccgcttctcctcgaatatcttctctgtggtgcctgtggaacccggggttagagaggtgggaacccacccgaccccactgggaaacaaggcgcccaggagccctgtgtctgggaggagcagggctgggacctgagggcaagatgaggggagggccccgtactcacaggccacataggacacctctacctccaggctctcgatgtcagccacgttcacgtagaagaaaggtttggactcaggaatggtgcccccgatgccaggcagtgaaacgttggccaagcagcagcagcagtacactgtggggatagaggaggtgagcggggagggtctgcccctccacagcccttcctccctcggagcctgcggctcaacacctctgctccaggctatctggtgcttcaggatccaggtggtcctggcgttctgaggagactggaggtggcaagccttttggggtgccatggcagaaactgacccctcaaggtgacgtcaacaacgtgcttcccaaacccaataaacatttctcagtctttctctagctggtcttgcttagaatttgaccttgtcagaactccggcctctgtaacccttgtgtcttccggttcccccttctgcctgtccctccctagtcctttctgtccttccacctttctggtccacttcctgtgcctggaacacccctccacacttgtactttccccaggtaacgctgtccatcctggatatgagtgcagaaataatctaccaccctcaaatctttatctccagctcaaacgcccacaggtcccgacccagctaggcagggtgggcagacacccctgctgtgaaggtctcaaggcagcacaccctcatcacatcccacactaaccttatcaagccagcccccggctcctcctccgtcccccatctggtggccccaccacccttgttatcctagactctgcttccactgcaacctcacacacatcagaacctttacaacccaatcagacaacaagttttgtccagtttctcttaaatccatctagaatgcatcttctctgctttaatccagccctaatctttggccaggccactgatgtgtcatccaacccatcttctacattgtcaacagtgttcacagccaatcagttcactcccgggcttaaaaccccatcccctggatgtggcccaagctcttccaaacttggtcagtgacagaaagactcaagcagtttctgctccagggatttaagcagcactcctgactctggcttctggttacctctatagcacaccacgcccacaggtgggggagaaaatatcaaaatgcgctttcgaagtaaggcaaatttccagaggatgaggatctgttctccaaagaactttataaactgagacatgcagccagctgggtgtgtgatctgaaaaaattgaggggaatagggaggagaaagagtgaggaacagcttcttagaaatatagcaaaaggtatctaatctccttctctgaaattctaaagtccatccaaacagatacattaaaggatgcttatttccacacacaatgatgtttttcactttaaaagtcttacctttaaactggatttctataatacaacagctccctgatacactgatgtttgagttgagtgatcattattttactcaggagaacaatgcaaaggaaacaaagctaaatttaaatttaaaaaaaccagaataaaagcatctgcttcaataagaaaactcaactcgaaaacattactaagcactgttaagtaataacatgatgagcaaacagtccccagtcagatcccaaatctatgggggctgctactgtgcaaagtgaggtgtctgcagaagtcacaggtaggaaggagcccctggcataacccctgctgcacttcacctctgaccactcttccttctttttttgagatggagtctgactcactctgtcacccaggttggagtgctgtggcgtgatcttggctcactgcaacctctacctcctgggtttgattttcctacctcagcctcccaagtagctggaattacaggcatgcaccaccatgcccggctaatttttgtatttttagtacagacagggtttcaccatgttggccaggctggctttgaactcctgacctcaactgattcgcccaccttggcctcccaaagtgctgggattacaggcgtgagccaccacgactggccccactcttccttctgtcactaactggcaacccctgaattgccttctaggaacactgagccaaggagtatcataggggttaagagcataagctctgatcccaggaagagctgaattccaatcctggccctgccatttactaacagggagatctggggaaagttagctaatgtttccggttcactatccttaactgtgaaatacggaatcatcacctacctcgtagggttactttaaggaccgcctgagacaaaacatgaaatagcacataaaaatagccaatatggggtggccactactgttgctttgaaaaacagaaaggcttcaaaccctgggccttgtgagctttgtgaaaggtcatttccatgccaaagtgccagaagaaagagctcatcacccatcagggaggcaggcaagagcacttctgagagaggcaccgactctcgggctgcgtgctagggtttaacaaccaccagccttcagaggcacctatacccgagcctcagggcagcctctgcactctgcctgtccaagccagggctgtcctggaccctccgaagctgtgtctgcactacccggagaggatttccctttccaaggcatcactcctgcactgataccattcccctaccccatgccaggataaaggcgaccctgaactgaacatgtcctgtttgccacccacgcctactcctctgccaccgcaacccaaatcatgaggaggagaggcaccaagtgaccaaggctggttgcatccctccaatcgctatttctcttcaaagtctaacagcaaccagataggaaagggtgccaaagcacgtgccggttcctcccagctttcccactggttatcttcaagctcccaacttgttcttccaccacacagaggccaggtggggcttgcccaatgtatattttataggctagtgggagaaagcgattaaaatatagcctgacagagccatgatgggagaagaatggggcatggtggagcaaactggagggtgcctgatcccactctaggagagacagaaaagacttcctgggggaagtgatgttgaagcttcgacataaagatgaatctgaggccgggtgctgtgactcatgcctgtaatcccagcactttgggaggccgaggtgggtggatcacaaggtcaggagttcaagaccagcctggtcaacatggtgaaaccccatctctactaaaaatacaaaaaattagctgggtgtggtgtcgcgtgcctgtaatcccagctacttgggaggctgaggcagaagaattgcttgaatctgggaggcagaggttgcagtcagttgagatcacaccactgccctccagcctgggcaacaatgcgagactgtctcaaaacaaacaaacaaacaacaaacaaaaacagatgaatctgagggaaggtgttcacatacaaaggcctgcaggtaagaggcaacatggcccttcttgggacctgcaagtagttcaggccctgtgcccaggcccatgccagggaagcactgcccacagggccacctcctttcttctaaaagggtcagctctagagacttctcaccccttctcacctgcacatgcaacagaaattcctcctgctttcattgaaatctctttccctttttccagccttgtttctctggcttttacagagaaatctcttttcttgatgtctccagtgcgtaccttcatgttttccctccaacctttcaagtccatactccatcctcttttcactccaatttctttttactccctaaccactgtcagttcagtgtccatagcaggctctgatagacccatgcctgccactagggaagccctccactcccggggcccagcccccctcccctgtatccctctcccactcccccattttcctaaggggagcatttagcagccacatctggacctctcagagaggtcttcctcttccctctgcttcctttccagtttatttttttccctctgaaacattcctatatctgactcctacattaaaagcttacttctttaaagtttttttttttttttttttgagagggagtcttgccctgtgtggcccaggctggagtgcagtggcgctatctcagctcactgcaacctccgcctcctgggttcatgcaattatcctgcctcagcctcccaagtagctgggattacaggcgcatgctaccatgcctggctaatttttccatttttagtagagatggggtttcaccatgttggctaggctggttttgaattcctgatctcatgatccacctgccttggcctcccaaagtgctgggattacaggcatgagccgccgtgctcagactaaagcttttctttatacgtgtgttcatgttgtaaaaattcattgaattatatacgtatgatttttgaacttatttctataaagttttatatttcaataaaaagcttaaagatatatatatattattttccatacatgacaagtattgtatcatatatactatttttgaacttattcctataaaatgttatatttcaataaaaactgacagatatattacattattttccatccatgacaagtattattatatcatacatgctattttttttttttttttttttgagacggagtctcgctgtcgcccaggctggagtgcagtggcgcaatctcggctcactgcaggctccgccccctggggttcacgccattctcctgcctcagcctcccgagtagctgggactacaggcgcccgccacctcgcccggctaattttttgtatttttagtagagacggggtttcaccgtgttagccaggatggtctcgatctcctgacctcgtgatccgcccgcctcggcctcccaaagtgctgggattacaggcgtgagccaccgcgcccggcctcatacatgctatttttaagtactgtcatttttttttcctggtccctgccttttttgtacatgtaagccttgccctaccgcatcccatactttacctcatccagggaatacataacttaataagctcatatacacccatcaatactttccatgtttatgtctgggtgtgtgtgtgtctctatctagacagacactgtgattgtttaacaacagtgtaatcatatcacatgtacagtcggctggccctctgtatcccctaataccatattctcagattcaaccaactgcatgcagatcaaaaatatttggaagaataaagaataacaataagaaaatttaatacatgtaaaaaccaacatagtataacaactatgtgcgtagcatttccattgtatgaggtattataagtaacctagaaatgatttaaagcacagaaggtccctgatttaccatgattcaactcaccaagttttcaactgtatgatgggtttattaggatgtagccccacgttaagtcaagaagctccttaagactttgatgggattatggcttctactgaatgtgaattgcttccgcaccatcataaggtcgaaaaatcatacattaagtggacccgtcgtaagtcaaggactgttggctgggttgccagcattaaatgcacttttgacttacaatgttttcaacttacaataggcttatgggggtgtaaccccacagtaagttgaggagtatctgtatatgggaggaactgcataggttatatgcacatactacaccctactacatgggaacgtgagcatctgcagatttgggtatctgagggagggtgcctagaaccaaggccctgcaaataccaaggaatgatgagttttctgcacgttgctattctcacacaaatgagatctggtgatccttccatgtcaccttcttatgctctaattcactactcactatggctttctagttttctaccactgtgaacaatgttgaattaaatattgttacacatacgtcattctgatggatagatcctgaggagtaaggttgctgaaacaaaaggcacatgttttatttatttatttatttagagaagtctcactctgttgcccaggttggagtgcagtggtgcgatgttggctcactgcaacttctgcctcccgggttcaagcagttctcctgcctcagcctcccaagtatgtgggattataggcacccaccaccaagcctagctaatttttgtatttttagtagagatggggtttcaccatgttggccaggctggtctcaaactctcgacctcaagtgatctgcccgccttggcctcccaaagtgttgggattacaggcgtgagccaccatgcctggccgttttttattttgatgtgctgacatattgttttgtaaaaagaagacactccactgttatttgtatctgcaaccataacggtaccctcttccctgcatctcctagggtctaacagttatgttaatgagctgtcctcaaaagcatgggccattttcttttttctctcttagtccctcatccctggactcttatggggaagaatacgagtacatttaggtcagatgctggtcacctccctgtggatttggagataattccaacagaaattggactctgaaggaaaaaatgggtctaagttatgagcagacagaaagagaacaggactcaggtcagtgcaagcccagagtacctctaatggccctctaacgatttcttaatgattgtctctcagcctacgccacggggttgggaaacctgcaaatgacaattcctaaactcatacgccaattggcttcctgttagagttcttcaatggagagcatggactgtagattgaaaggcagaaggaaatctcttctgtttcttgctccagctagtatttctccaggagcagaagacacctatgactccagcctccagctttccttagcatgcacagcacacgtggagccacacctcctgagaggtcccagcacagatgcgcagtgcctccctcagcgatctgagcactggctgtgcagggacccctcctgcaggctcccatggttttgctcattctgcttctcttgctttgttaccctagccctaaggaagggtggcaggcagcctctaagatagtccccagtgatccccacctcttggtatttacagccttatgcaatcccctcttgctcttgagtaatttgcttctaagaaaatatggtgacattgcagggctgtcacttccatggttaggttacaaagggttctgacttccatcctgctagtatactctcttactggcttagataaagcaagctcacatagtggagagacccacatggctaagaactgaggggagcccccaactaacagccagcaaggtactgaggccttcagttcaaaacatccctcaagaaattcgatcctgccaacacccacctgatcttagaggtggatacctccccagtcaaaccttcagatgagcccctaaccctggctgaaaccatctcatgagagattgtgacatagagaatctggttaagccatgctgggattcctgacttacagaagctgtgaaataataaatatgtactgttttaaaccattaatttggggatttgttccacagcaataaatcactaatatagggtgttagtcaggctattatctataattactaaatatgggttacctattccttttttactccttcagccttccaactcctatattactgatttcctgtcttaaattagtttgaaatacctacatggtctctttacccggtaagcccctaattggtacttattaggattcaagctccagggtctactatttaaagctctctacaatctaatttcagcctatttctccaatcacttccctcatgccagctgacaaacatttaatcccagccaaactagtttgctcatgtctcatgaacttgtcttgcatttttccgtgtccacatctctgcaaaggcaatgaagtggggcaggaaacatgcactggctgtggcactagacctctgtttaaatcttagctctaactcctattagctataagacctaaagcaagtcactagccctttataagcctcggttgttttcgctggaaaacaaggaataaaaaaaaaaaaacaaaaaacatttacttttattttagagaatgctgcaacaggtacagataaatagctggcacaatgcataactcccagaaggtgctgagaaagtgacagaccatggttctcactgctgctcacacctttcctggttctggaatcagcattcctcactttccacctagccaaatactcagggactgcgtcctctcctaaggcatcttcccagagttctcccttggactcttggcataatttctctaccaggggagccctaggtttccatggaaatatcctgtgaccaaccacaggagacagagagggaagagaaagaggagattcatgttcttagtcatatttgcacccttccaacacctaacgctttgctgggtgttttgctaactgtaaataggcatattctagtaccaaagccaaagtacttcaggaacaaatacagaacgaagtaacatcagaagtgtcttaactaagaaatgtcatacttcttcatcagactcttcatctttagttcaaatgtctagtgttaaaatatcagaagcaatcaacagaattaaatctatcttttcacaactggcctatcacacacgcctttatactatgattacagaagtgtctagaaagcatattgtttaagataacttgccttatgttttaaaaaaaccaaatgcttatgttgcaactctgttctatcaaaagtagacattttgtatgatccaaagacataaattttttattcattaaaaagtaatcaacagctactattcccagatacagatccagtatagtgtaagaaaagcagggctaacctcaccttcatctcagggtacatgtatcggtggatggaaggcagccagtagacagggggcaggctgctgcctctgccgggaccagcatggagcaccccctttttgtcctcatagaaggcagccagatgagagtaatgtcctggcatctccaactggtgcctgcagaaaaacacacacacacacacacacacacacacagtgagaacagccctggtcacagctctgctaccactcctaccctccgcccacctcaaggggctgtaacactcaggggcaaaggccctgacatactccaaagatccccatttggaggttgcttaggtcacctcctttgatgttacagaagatccttaggaaaagttcaaacatgggcctgaaactccctgacaacaccatggaacacattctttttctcatgggaaacagacagaattaacagactatgactaatgtctattgttcttgagcaaggtacgccggagactgggtgccacttcccagagaatggctgcttcctgtgagaagggccagcttggaagcctaaaattccctgcttaaagccgctctttgtttagagaactcacgcttgcctgcttgctttgttgttatggaagaatacggagcttaccccaaatgtctcaaataagggaaaacaattattattggatgtcatcagggctcataatttctgcatcaagtataataataaagaaataaaaagcatcagaatctcttctctgcccgctccaccagctcgggtcacagagcctggctgtggctggccctgctggccaaccccagaccccagaacccagaaggcagcaccgaagccctgggccatttcaacagtggagaatcctgccccccagtggagcgcaggagcactgtgaggactgtttgtcactatatttaatggggatgttataggttgaattttgtccccacaaaaaagatggggccccagcacctcactcagaatgggacttttttggatagcatctttacataggtaatcaagttaaaatgaagttactggagtgggccctggtccagtatgaatgctgtccttatagaaaggggacttttggacacatagacacacacatacagcaaacagcaggtgaacgtgacgacagagactgggatgatgcatctacaagccaaggaaccccaaagattgccagcatccaccagcagctcagggagagtcctggaacggattctcctgcatagccccagagggaactcacactgctgagaccttgactttgggcttccagcctctagaacagtgagacagtatgtttctgctgttttaagccactcagttttggcactttgttatgcagccccggaaaagccctaattgagggaggaataaaaagcgacaaaaccctcttagcccatctttattttctcagtgtcctacaatttccatcaatcaatgaacaaaaagcaaaatatagcttcactgagcaagggaaacatccctaattatggttggccctggaacagcagtgattaaaaataggcactccccgctgccacaccgcctctgcaaactgccacggtggcttaccccaaactatgacacaaactgttgagtcaagattttcatcaaccaactatagccttctattctccaaccatctctactccagagtgatttacagctcttatgtcaaagtgatgacaagagaccttcagacaaatttatattttaaaaaggaaaaaaatcatcactatattcatataatgattactaatgtaagatggatgatagcgccaatttcagggctcctatgcattttaagttttgacaaggaggtagtcctactataacaaatatagtcctcctataacaaataactagttgggaggaggttgcttgtagtcacttagttcacttttacaaatgttcatgagctagacaggaaacccatggtctaagctgtgtctgactattctgagaagatggcagatttcagatactttttagggaagtttgtcaaactgacgaaagtctgattcacagaaaatcatacaaaggcaattatgttcaaaggtgtttttattaggatggaatttccctaaaaagaacactgagaatcattttatcatattttaatactacattttctgtgttatagggggctgtgtcaagggtaatttatattttttcattcaaagttgtttcattagtatcaaatttccctaaaaagaatactgagaatcattttattatatttttaatactacattttctgtgttaaagggggctgtgtcaagggaaatattttttcattttctaggtttattgtttgctgatttgctgctcagttgtcttttctgtttgactacattaaactctatacttgaaccacgattctaaagaaaagttcagtacaaaagttagagtcctttagacaaagaactaatatgaggattctgtcctttgattgcctcagatattactgactgatgggacagaacaaggcaataatatggaatctgaacatagacaaaaatacaaattggcagttcctggatgaatgttaagcaactgctgtatgaaagactcaaaatttaaacacactacagattttgcaacaaacaagattgtcaaactacaatatcaagaaaaaccaaaaagtactgacacaaggctcagagtgctggatgataagttagtcttcaaagatgatgtcaaagcagcccttcctggtgaacttacctacaagaatgcagaaattgagaaaccaccacaccgaaatgcatgccaaaccacctatggaaactgtccaagagccgtgacactgtaaaaactagagaataaccggctcaatatatattattaatcagaagccataggctgctgggccagagacactgggattctccttaagcccacagctccttcactgataaaacacagccatatgtggccatgcagatgcccagtgcaactgaccctgcctgtccctaccacactggcaataattcatccacgatcagaatcagagatgcctttgtgcgacaattacacttcatcactctggtgtgttaattattggtctgaacaggccgggcgtggtggctcacgcctgtaatcccagcactttgggaggctgaggtgggcggatcgcttggggccagaagttcgagaccagcctggccaacatggtgaaacctgtctctaataaatatcccagctactcgggaggctgaggcacgagaattgcttgaacccaggaggcggaggttgcagtgaaccgagagagatcacgccattgcatccagcctgggtgacagagcgagactcttgtctcaaaaaaaaaaaaatatatatatatatatatatacacatatatatgtgtgtgtgtgtgtgtatttacatatgtgtatatatatttatatatatttatatgtgtgtgtgtgtgtgtatatatatatatatatgtatatatatatatatatctgtctgaacaaatcgtcttctagctcctggctttgcaaatgcagaaaactaagcactcccatttactgcgggtgcagggatactgtgacaccaccttctgaagggtaacttacagcttgtattaaattgtacattgtacacatcctctgatctaatgattctccttctcggagtgaggcctaaagaactatttctagacatgaacagtcatttactcacaaggatgctgatgttcacaggggtgaaaaaaacaaggaacaccctaaaagcccaataacagtgaaacagttaaataaattgtgatgtatctatatactgaaatgctgtgaaaccacaataatgttgaggacataattcatgatacaccggaaaggttaatataccaagttacaaaatttacatactgaatgacctcaataatctttttttttttttcttttggaaatggagtctcgctctgttgcccaggctggagtgcagtggtgcaatctcagctcaccgcaacctccacctctgggttcaagcgattctcctgcctcagcttcccgagtagctgggactacaggtgcacactgccacgcccagctaagtttttgtattttagtagagacggggtttcaccgttgttgctcaggctggtctcgaactcctgagctcaggcaatctgcctgcctcggcctcccaaagtgctaggattacaggcgtgagccactgcgcccggccaataatcctttttaaaagaaataaaataaaataaaacgtgtatgtataatatatatttgcacatgggaaaagactagaatggtataaaacgaaatgttaacagtagatatgtctggctggtgagatcatttttttctttgagcttttctctattttttaaagtttcctataataactatttcttaattttatacttagtcattttaaacttttcactatgaacattttcaaacatatacacaaaatgtagaaagaagagaatgaaccccatgtatttatcatctagcttcaataatatttgatccatatggttatatctataccctataccctaccattaccacttttttcctagaatgtcttaaagaaaatcccacctcataacatttcattgataagtgctttgtaaggcatctctaactgataaagtctgtttaaataacgtaacacataatcaccatgccattatctcatttaacaataataatgccttaatataaatatctagtccacattcaaaatacagccactgtcccccaaatgctattttaccgttggtttgtttgaattgagatctgagcaaggtaaaatgtggttatgagtcgtaggtccctttattcaataacagtccctcttgcctctaatttaattttttaaattatgaaatagttctccaatatcttctgattaagaaataatcattaaaaagactctttagagagatactgagggcaaaaattgtagatgaaatacaagtaaataggtttggaacatcagaagtcagaagaaatataaaacacagattaagtgttgcagaaatgaagactagtgaatttatgtaaaagttgctgctgtattcaagtattatcctaagctagacctaagcttatctaactgtgcttctttcttttcctcatactctgtcatacaagtctcttctcttatgttacctatagccctctttaaccaccaagctgcaaaacctttctagctatgactcaaaatctagaagccataaaaagatgcatgaattcaaagaaaaacacctacatgacaagaaggcaatgttaaaagacaaatgaaaaagtggtaaaatattttcaatttatacaaagaaacaaagaaaaaatttccctattgtacaaactcctagaaattaataagaaaaggctgggtgtggtggctcatgcctgtaatcccagcactttgggaggctgaggcgggtagatcacccaaggtcgggagttagagaccactctgaccaacatggagaaaccccacctctactaaaaatacagaattagccaggcgtggtgacacatgcctgtaatcccagctactctggaggctgaggcaggagaatcgcttgaacctgggaggcggaggttgcaatgagctgagatcacaccattgcactccagcctgggacacaagagcgaaactttaaaaaaaaaaaaaaaaagtaaaagaaattaataagaaaaggtaaacaacaaaatgtagcaaaggctagaaatggttcacagaaaaagaaatacaaatgactcaaacatacataaaggtgcttaacctcacttataagaaaaatacaaattaaaactatactgatgtactgttcttttatccatcaggttagaatgttcaaactttcattttgtgttggcaacgttgaggtgaaacaggcattctcttgcattactactgggcatgcaaatggcacaacctctatgggaagcaatttgacagaatctattaaaattacatacatatatcctttgagccatcaatttcatttctgacaatttaatatacagatatacccctcacgtgtgaaatgcatgatattcaatgcagcatcatttgtagcaggaaatggactggaaacaaccaaatgtctattaataatgaacttgataaatgctataattctatagaaggcatatgacacagctgaaaacaaggaagaaactctcaacctactgatatgagatctttcatgctgttgaatgaaaaaggctaggtgcaaaacaacacaaataacatgctatcttttgcaagaaaagggagacagtaagaatatacatttgtatttgtatatatacacacacacacactttgggatgatacatgagaaatgaactgtgattactgagattatttggatggatatgggaactgggtgaagatttttcactttatgtgagtggtagtctgccatactcttcttcctttagtaacagaaccttccaaattttagatggacacacggacgcccagctaaaggccacatttcccagattgccttgctactatgtgtgcctagtaaccaagaactggtcaatggaatgtgaacagaggtggtgtgttcaacttccagatcactcaagttccagatcccagaagttgaacacagcacctctgctcacattccatggagccaaggtctttccctcttcctacatgctagaaaatgacaatgtaatggggagacagcttctaccatgtggatgaggacaacaactctagaaaatgacataatgtaagactgaatgactcaggtccaagaatgaccagtggaacagaaccacctacccacaatgaactactacgactgccatgctggaaaagctgtaattctatcttactgtgtcactgtattgggggtctcttcttcattatagcaacttagcctatactctaaaagccaaaaacgatacctggaaatgagttactacagtatcaaaaaccatatagagacactggctttgttgctggaaggggagggtggtgagaaaatagatattgcagactagaaagctggcaacccttgttacacttgtagcaaaacatctgctaaaacttcaataacttgggagaccctgtgtcatctgaatttgtagctttatgggaagcagttggcagtagaatgctggtgtgtgttgactgccccttgtatgcttttagtgagctactgtaagaataagataaaaacaaacaagaactggctggtttgcaaggaaaaacggaataaaatacagcctactaagggtcatgtgttctaaatttggcaatataaatccactgagattccaacaatttgggaccccacagggctggaaaagccaatgctactgtacaccaaaagcaggagacaggagtctctctcagggcatctatgaaagtctccagtttagtattcttgggcagacaagggagtcagcttatttacaaagatcagatttagggaatcacctcaaggaagttattatgaaaatgagggagaaagggatgggccaaaaagagaggccagtaactataatctagtctgctaattaaaaacaatgacccaaagaagatctttggccatggatattttacctggaactgactggaagcaaacaaacgagaagtcaatttagtttttgagagacatgtattgtcacatgcttggcttataaaagcctgtgacttcttgaccccttaagaaaccactagacctccaaatctataccagcaggaaaggtgttctaaagctgtacagcctcaagaaaggcatgttctccaatgcccactgtagatgtggttatggaggaaaatgaagaaagaatcttctagaagacaaagccaagtgccatggaggacaatggacaagggattctacacaacagaaccaaagttgagccaagagcatactgactctgcaattcttgctcagcagaatttcactgttgttatgaactagtgaccatccgtatttctcattcttcccttttccaaacagaagcttgtattgtggttcctactttacctcctatattgcatttgggaggtagggagtagagggacttgtctattcttttataagttttcagggtaagaagaaccatgccctggcctaacgtaaaggactactgcgcactacagagaaatcctagattttagactggaagcatgaactgaatgagactctgtgatgtctcctttggggtgggaggaatggcctctacaagggggaagaagagtatacatggatacctgagtggccagaggggcaaactgaagcagaagctgctaactttttctcaaagtcaagtcttcccttcttcctgtttgtaaccaatgccccagagttctaactggtcacagggtcacccacctagtagtgatgcttcccaggctactttgctgttgggtgtgtctctgtgattgaggacttgacaatggaatatgagaagtgagatatgtaaattctagtctttccttcttccctatgggctgaaatgcaaacataatagtagtgagcagcttttaacatttgggaaagagcaccttacaatacaaaaccattcttaggatacggtggaataacaagagatgaatgtgggtccctgaacaattgtatggaacagagcaggctacccaacttgaccacctgcctacctctacgctatgacatgagcaataatcttttatcgtaatccggccatagtaattttgggcctctgttcttgccttttagccaggaccctatccaatataataccaccttaaaatttttggattttgaaccatgaaactgtattgcctacttggagaattagctttttaaaaggaataatattgttttaaaagtgtcaaaatcccaataaaatggtcttttttagaacttcataatattacttctgagacaaaaaaaaaaaaaactgaggaaatattttgagtacagaaaaagacatatgtgcaaatgtattttccacagctccaaaaggtagaggagcagctaaaaaaataaacagtaaatagaaacatgctgcatgttcagccacagagaataaccaagtaaatgtataggacagctccagcattgaagagctattaaaataagcatcaaaatgacaaacagggaagacaatgggagaaaaacatatgcatcatgggtattcctggagaagaaaaaaacagaatgcaaaagttaaatattttattaaagaagaaaaagttcctaaaattaaaaataaaagaactatctattgagcaaaggggacaaactatcccagaacatactgatatgaactaataaatatttggcaagttcaggccaggctcagtggctcatgccggtaatcccagaactctgggaggccgaggtgggcagatcacgaggtcaggagttcgagactagcctgaccaacatggtgaaaccccgtctctactaaaaaaaaataaataaattagccggctgtggtggcgggcccctgtaatcccagctactcaggaggctgaggcaggagaattgcttgaacccaggaggcggaggttgcagtgagccaagatcacaccactgccctccagcctgggcgacagagtgagactccatctcaacaaacaaaaacaacaacaacaaaacaaaacaaaacatttggcaagttcagaaacagcacagacaaagacagactctataggtatctggatggagaaacttctccaaaacgactaatttcagataacagtagaacaatatctatagcatcctcaggggaagaagaaagcattcaagaattgtacaaccagctgaggataaagggaacaggccaatagtattaatcatgcaagatcctttcaaagaaagaaaagtgcttgatggtaaaattcaaccattaaggatttttatttttttattttttaaacagggtcttgctctatcactcaggctggtgtgcagtggtgcaatcatagctcactgcagcattgaacttctgggctcaagccatcctctcacctcagcctcctaagtagctaggactacaggtgcacaccaccatgcctggctaatttttttgtttttgtagagttggaatcttgctttgttgcccaggctggtcttgaattcctggcttcaactgatcctcctaaattgatcctccttggcctcctaaagtgctgggattacaggcgtgagccaccattcctgatcaattttaatgtttatatattgtttcccagtaaagtactgacaccatattgtcacgtttttcataattgtttttcttaattttggaggaatatttcaaggaatagtatatcttactgtgaaaaaacatttacttgaagttataagtcaaattatgtttaatatatttcattaacacagcctgctatttgagaaaattaaattcataaaatattaatcctatttttgtaaagatatttgtattctagaattgcattcatggaatattgtcaatggatatctgtgagtgttaatatatgagaggatttttaaaaatcctctgtactttcatataaatttttaaataataaacgtgttttccacaaacaagttcatgggttcaaagctgaagatcacaattatgttgcataaaaatgtttacgtagtgataaattttaaaagtatagactataaaagaggatatatattgtatgatgccaaatatatattttaaacgtacacacatacacagaaaagaagtggtaacattttgtcagtgcttcagggattagggataaattttcccctcaaaatctgaaatgtaattaggttacctgcatgatgaaaaaaatgtaaagtaactaatcgttttgctgcttctgttaaaaattctcttcctatgccaggcaccttggctcatgcctataatctcagctctttggcaggctgaggcaggaggatcacttgactgcaggagttcaggaccagcctgggcaatatagtaagagcctgtctctaccaaaaaaaaaaaaaaaaaatatatatatatatatatatatatatatatttttaagttctctttctattatcccaatcatagtaagaatcccaataataaaagaagtaggctttaagaaagtttaggatttctttgcctacttggggcaaggaggtaactattgcggctttgcataaacaaagatcatgtacctgtcaaaaaatgacttaattttaaaaagtgatggtagtattaaatccaaactgaaggcagaatataccccagctttcattatagagtgaagactcatcatgcaggacgttggctgaaacgaaaggacaccacccgaggcgtgaaacatcgccatggatgttcttggaaagacatctgctgctctggcacgcaaatgctgtctccgagggctcgtgccatatgcaccagctggtggatcctgctgcctccctgcacatgtacggaagccacgtaccgaacctggttctccaagaagtgcatgtagcggtaaagcagtgtgtaggagggagagaggatgcccacagacttcatccgcgcgccacgttccagctcgctctccacgggcatgttggcaaagcaggccaggccgaagaagggcccctttcggaaatagctagaagagaccaaatacgtagtgtggctcaagatcagagaggaattttgagatgcaatcctaaacaaaacaaatgaactgtgttcggggctgtcaatgacaaagctcagcctcaagaaaacaagcgggccaagccacatgacctcactgatgagcttgaagagattacataacttgccaagggtcacttggctggagctgggacttagtccgtggcaagcctgccgctcagctgcccacaatcatggacacatctcttctctcctgcaccacgactaatgacttggatgggtgaagcagaaccaacattcctcttcaggctcctctggaacttggactctctttcgtagcataaaccacagtgattcttcccttacttcctgaggctctgatatttttcactgagctgccattttatttcctcctcttctcacacttgtatcaatcatgaattaagccccatgaggagattaaagccacttcattacccttaagctctttccattgttccttctcgcaaaactctctgaatgccccactacacaggactaaaaaatggccttacttaaagctgaaatttcaaggttgaacacatagatatcctcagttaactcacacggggctgaaactgtgcactttcattaaaaccaaacctcaagtgaggtccatgtaatttctgagaaagtgagagaacctctacaggcagggattcttaagatttgcaggtcatgaagcccattgagaatctgatgaaagctagacatctcactagaaaaatgatgtaaacacaaaactatccatgtattttcaaggcatttacacacagcacacgaagacctcctaataagagcccttcagctttggggaaagtgtggaggtggggggaatggtacgaagatgactccagttcagaagtacttacatgaaatcagattggattttatgggacccactggccatagacttgaactcaacaccttcaaggtcaatatcttgaggtaagcaccattctaccatgtttcctgcaggaaaaggaagatgcaagttaaaagaaacaacatcattcaaagaaaatgggttagtacagggcttagcacacatggcttttcaataaaccgactgctgactcagcctcagacagaccagcgagatgctcagagctcagcccctccatcactggcaggggtgacgccggaggacgtggaggtggacactaaaagaacctcccatttctgccctcaaacactgttctcctccctcatgaggatgctgcgtttgcttctgtcattctgctcaaccacttccaaatctgctttttgtagcctcacttctctgcatgtttttttaaccttccaccctcatttccttatcttgtgttctccccttaatcccttgagatcttgattctatctatagccactaatgactgggaaaaaatcccaaaacattttttaaattctcattctcgtttacctctaggtagcatttgctaattcctcaaacatttctcctctttttcctggattttcatgatagaatactattttagtgcttttcctacctctctgaccaatgtaactctgtttcccctcctctctctctcctctctaagtgaggtccttcttcaagggacaatgatatttgcttccagaattttgggactcattcactcatcattgattattcagtttctcctgagctagatgctggagatacaaagtccctgacctcagtgagattagattccagagagaaatgaggagagctagaggagatcagcagttacagtgcagtgggatcaatgttatgacagaggataaggtgcgatttttttttttttttctcgagactgagtttcactttgtcgcccaggctggagtgcagtggcacaatctcgggtcactgcaagctccacctcccaggttcaaggcgattctcctgcctcagcctcccacgtagctgggattacaggcgcataccagcacactcggctaattttttttttttttttttttgagacagagtcttgctcttgtcacccaggctggagtgcagtggcgcgatctcggctcaatgcaagctccgcctcccaggttcatgccattctcccgcctcagcctccccagtagctgggactacaggcacctgccaccaggcccggctaattttttgtatttttagtggagacggggtttcaccatgttagccaggatggtctcaatctcctgaccttgtgatccgcccacctcagcctcccaaagtgctgggattacaggcgtgagccaccgcacccggccatgcccagctattttttttgtatttttagtagagatggggtttcaccaagttgcccaggctggtcttcaactcctgacctcaggtgatccacctgcctcggcctcccaaagtgttgggattacaggtgtgagccaccgctctaggccaaagtaggattttaaaagtacaagcatgcctcgggctgcgggaatcagggaactacacaatagcagtgttatctagagtcttgagagaacactatagaatactccctgttgttttcatgcatattcaaaagggtttaaagcaaaacactaagctatttgtgagatttcatttcagaacaaacttcttattaacactccaaatcctaatttgctaggcattagaaaaaccatcaatgatcccagccaaacaacgctttcagataattgttcagggcatcagggaatacacaatctagtctcaggacatggtagatatcatagagcattgtcgaatctcacactcaacagcccaagtcactttcaaatagtttattttcaaaagaggaattatgattctgatcatttagtcaattcactaaagtgaaaagcatgaaaaaggaattaagagttcataaagcagaaagcctcgaacaatgttatgtttgtcagggtcaaagataagaaaaagcactcagaaagaaagaggggtgaccttggggataagacgagttttttaagcaccaagttcccccacgctttcctatattttcccctaccatccatgtctattaccttcacagtccagtcgtttttttcctgtggaatgcatcaggacagctagggagctttaaaaggtgccaggggctaccctaggtctatagaatcaccatcttccctgccctgccacagggtgattctgctgatgcatgccagcaataagagcccctgcttgggcctctgtatacacgctcctaacgcttaacagtggcagtatatggtcagcagaggaaagggactgtctgggacagagctacaatgaccctcgataggctctgtcctcctcatactcaaccaacctgcttcttctaatacttactgccttgtttacccacacgccacacattacggggttcagctagctcaaatttagcttctttcctccaacccagcctgcccatgactactcagtgtcttaaaactttatttacccaaatgttatattgaagtatagcataagtatagaaaagtgcaaagatgtttattgcagcactattcacaatagcaaagacatggaatcaacccaaatgcctatcaatggtagaccggataaagaaaatgcggtacatatacaccgtagaatactatgcagccataaaaaggaatgagatcatgtcctttgcagggacatggatggagctggaagccattatcctcagcaaactaacatgggaacagaaacccaaacacagcatgttctcactcataagtgggagctgaacaatgagaacacatggacacagggaagggaacaacacacaccaggtcctgtcagcagggaaggggaagaaaaagcatcagaataaatagctaacacatgcagggcttaatacctaggtgatgggttgagaggtgcagcaaaccaccatggcacatgtttacctatgtaacaaacctgcacatcctgcacatgtatcctggaacttaaacttttaaaaaaagtgcacaaagtacaactcaatggattttcccaaagtaaacatatttgtgtaagtagcacccagatcaagaagctgaaagaacattatttgtacaacagaaacctccctcatagcagctccaagtcattaaccctctctcatgaattagcttagcctcttctgagtttctacaaaatgtaattatagtttgcttttatgtcttttatgtcatccatgctgatatgtgtagcaacagtttgttcatctattacttctatcatatgcatgtagcagtttacctgcttaactggtgatgcacatttaggttacttccaatttgaagttacagcaacgggcactgctgtaaacaatcctgtatttgccatctgctgaaatagcgtaaagtggcattgtaatgcattgacctggttgggctgaactatccttctcagaattcccttctttgtatgtttccagctgagatttggaagtgaatcagtagccacgttatgtttgcatctgtaaggtcagtgcagaaggtccactgcatagctgcttctctgcaggcttactagagtggtgaggggcagcagccagccctgatgatgctgcagccaccatcccttgatcttccttcagtttctctgactcctaagccaggtgtatgtttagttccataataaagggcatcggcttctccttaggacacccacatcaccaaagctggatacagtaacagcctgatccgcgttcccacctatcttcatgagtttcagcttcttactcttccttttcctcctcctcctcctcttgttcagaagtttactctcttccttcataactgtctgcccagtagacttcaaactccaacatcagatacaaagaacagccttatatagattgtctaacagctcccacagttgcataaaaccaaatccctgcaacaaattcctttatgtatctcctagtttttcggttcctctgattgaactttgaccaacacaatatgcacatttctactgactacatccctaggaatagaattgctttaaaaatgtttgcgtcactgcaaactaagacactttcaatgattcccaaagtagtatttcccaagcttaggttaatagggcttctgcaaaaaagaaaacaaaattttgtgaaatgtgtgtgtttttggccaaattatcttagcttaaacaaagctagacacattcctttattgaagtacttctcagagcctttaatatgccactctgcatcgtgaatctccgtgagatcaatacagtgcttaatgtttccccaaattatcttttttaaaggagtatcttaaatctttttaaaaggagtatcttaagagactaattttatagaaggcactttttaaaaaaaaaaagaaatacaggtatatcaggtgtgcaagctgtccttccatatccactcttctcttcttatatgaatcagaacctgttatttttagcttggtgcatggccttccaaatgaaggctatgtttctcagtaccttcatgagtgaattctggtcagtgtcatgtggacagaaatgaggtgcatcacttccagaaggtgcctgaaaggcaaggagcacattgcccctttctccaccctgctacctggaatgtggatgtagcatcgtatcacagaggggatgctggagccattggtcaacgtgggtctaggtccctggatgaccctggagatttgggccagtattctagccccaggctgctatcacctgatcgttacatgaaaaagaaatagactcctatcttgattatgccactgttgatttgggcttctagtattcatgtccagcctatgtcctacttagtacagctgacctagaagataaagtccccattccttagcctggttctcaaaccctcttccttgctcctctgtgcctaccaaatctaattgcacagaaatggaaaggaacagagggagcgaatgacatactgttagttacatccttcactcctaggtggacataagcccatctgggttgggaagaaaggtccattagaggctggcaaatcaaagaacagggcacaggctccagaacaccactctggggagaggtatccttatcccatggcaagcacattcctgctgacaactccttgaatgaaagggaagtaggtagagctactatggcccttatctctacatatgataatcatgtctttgacgtctgtctctgcaggagtctgttaacttttacaaggtgagaattttccttgtcttcacatttctatatagtatcatgccttgcacaggacagaatgggtatttaaaaaaaaacagatttattaagggcacgcatgtgtttaaaaaaactgatgaattagtgttaattaccttagcaatagtaataatattgtagttacataggaaaatgttcttatccttagaaggtttatactcaaacgtttaggagtgacatattatcatatctgtgacttactttcaaatggttcaggaaaaaaaggcatatccatatctgtatatagtcagttctacttttatcacttactggatttgtgtcaatgcaacagatgtacttgagagcaatttgagcacagggaatttcatattcacttatgctatagactcaatgcaatcccaatcaaaatcccagcaaattattttgcggatatcgacaagttaattccaaagcttacatggaaaggcaagagaccccaaatagccaacataatactgaagaacaataaaattggaagacgaacaatgcacccaacttcgagacttatataaaattaatcaagagagtaggtattggtgaaatatcagacaaatagattaatggaacagaatagagagccttgaaacagacccacacaaatcaatcacataatctttgccaaaggaacaaaggcaatataatggagaaaagacagtctttacaataaatggtgctgaaacaagtggacatctacatgcaaagcaatgaaactagacacctactttacccctttcacaaaaatttattcaatatggaaagtagctagcctaggcaacatagcgagaccctgtctctacaaaaaattaaaaaaaaaaattagccaggcatggtggtgtgtgcctgtcgtgctagctacctgggaggctggggtgggaggatcacttgagcccaggagttcaaggctacaaggagctgtgctcactccactgcatcccaacccaggcaaaagagtgagaccctgtctctaaaataataataattttttaaaatatgtaaaccaaaatgtaaaatgcagaattataaaatttctagaagataacacaggagaaaaatctgggtgactttgggtttagcaatgagtttctagatataatactaacagcacaattcatgaaggaaaaatggatatattggacttcattaaaatttaaaacttctgatctatgagagacactattaagggaacgaaaagacaagccacagactgagagaagatatttgcaaaacacatatctgataaaggactgttatctaaaatatacgaagaattcataaaactcaacaataagaaaacaatccaactttttaaaagggtaaaagatctgaacagacaactgatcaaggaagatacacagatggcaaatgacatgatgttgactattttttcatatgctcattacgcaattgcaaattaaaataacaatgagatatcatgacacacatatcagaatggctaacattcaaaacaccaaatgctgatgaggatgtgggacagcaggaattcattgctggtgggaatataaaatggcacaaccactttgaaagacagtttggcagttttttacaaaactaacatgttattatcaaatgacccagcaacgatgcacctttgtatttatccaaatgagctgaaaacttacatccacacaaaacctgcacacagatgtttgcagcagctttattcacaatggcccaaaactggaaaacaaccatgatgtccttcataggtgaatggataaataaaacgtgagatatccatacaaggaaatactctatagcaatacagaaaaatgagctatcaagccatgaagagacatggaggaactttaaatgcatgtagctaaataagagaagccagcctgaaaaggctacatactatatgatttcaactatgtgacattctgggaaaggcaaaattatagagacaataaaaagatcaataggaagggagggatgaataggtcaagcataggatctttagggcagtgaaactattctgtatgatactgttatggtggatacataacatcgtgcatgtttcaaaacccattgaactgtacaacagtgaaccttaatgcaaactatggatttaaataaacaataatgtatcaatattagttcatcaattataacaaatataccacactaatgaaagatgttaataaagggaaattatatgtgtatgagtgagggggaggtagtatatgggaactctgtactttctgctcaatttttctgtaaaactaaaattgctctaaaaaataaaatacattaattatttaaaaaaacctaattgatgaattaacctaaattaactgccctaagagtggcaatgatactatggtgatgtagaaaaatagccttattcttaggagatttatactgaagtattttattttattttattaagagacaggattgcccaggctggagtgcagtggcccaatcatagctcactataacctctaactccagggctcaaatgatccgcccatctcaacctcccaaacagctgggactacaggtatgcgccaccatgccgggctaattttttaaatttttatagagatgaggtctcgccatgttgcccaggctggtcttgaactcctggcctcaagaaatccttccacctctgtcttccaaagtgttggtattacaggcgttagtatatgtattcacgcccagcccatactgaaaaatttagaaatgaaatgccatgacatccacaacttactttcaaatagttcagcaaaaaaaagaaaagtctatttatatctccacacacagtcagttctgctataatgcttgttgaatctgttccaaagcaatcaatgtattagggaatttgacatttgcttatgtgtgatttcaatcatgaaaaacacaaagtcaatgtggaaaactacacccagctgaatcaagccatgtcggaatatacaaaacacacccaccttaagcttctcctgctacctcaggtcacctcgttctgggccatgccatgcacctctagcgtcacagttttgcctctgatttcagacagcccccctcccaccacacatagtaattcacaggctcaatcctttcagcactcacctccagatacaaacaccaggtcttttaaaggtacagttccacatttactaagtatgtatttcttaaccatttatcatatgcaaaactgtcctatagtttttggtaggttcctatcttttttttaaaaaaaatgtgccactgacaaagtttttctcataagccctgtgatttttacttcatgatttttttttgccgcacagtgatttttggaacatatatttcatgttataggggatatgactatgtaagaataaagcaaatggggcaaaatgtcaataaacggggactctaagtgaaagacatacaggttttcactgcactattctttcaacttttcaaaacatttcaacttacaaattggggaaaataattgaaataatagcaatgtgaaaaaaaggagagcataaaggactttgcaaaagccaaaaataattgaggcaatgcaccacactaatagggaatgaagcgctatcagggcttgaagttatcctacagaaacattacaaatgaaaaccagcttacatatggaatttgaggagacttaatggaaagtgattttgcataattagtaatccttatgggatgccatttaataccagaaagaaactcatcctgactgctacttatcccaggctcagtcttcacattccatgcttttaggttttccagatatcctcactgtattaagaactcagccagggagctggggcctggaagattcaacaaaagaggtcatctcatggctagtccatcaaagagaggaggtgccagtgacaagtgcctttttctcccctaacttgctctctttccatctctgtgtcctttctcatcttggaccatgacttggacctattacaggtacttacaggcacttcctagcctctactgcaaagacaacttctgaggagggattcacatgaccacgggaggcacaaatgtggcaatatgcattgtgtacattcagctggtcattgaacaaatattggtggagcacaacttggcagcacggtgcctgccaggtgctgagctcatgcaaaggcaaatatgtctctgtttaaaggaacttggactaaccgactacgaggctggcagctcagttacccaggcaaagccagaaggtcagtgtcgcgcctggctgaggatgtacagatggtctgaaccctgccacttcacagctccaaaggtcagcctgacagctctgtgcaccagggcctcccagagctggggttttataagcccatgggctaggccagaggtaggctgtcctatctaggttgaccactgcctctgtcttccaaaactagttctgtttaaatgagaaatgaccaaacccccagctgtcttaaaattcatcactatttcctagggagattggacattaactgcagtaactgctgtctgctagaaagttcacctcaaaatatttaaaatagagaaagcaatgatcttgaaccaaaacaatctctttttaataggaaatatgtgaatttcttcttcctcctctgttagatggttcccaagcaagcacttcctcctgagctcttcatttcctatccagagactgcctcagctggagatcctcttccagctcctctgacctcaggagtggaactcccaccccagcacgtgcctgaggttttactctttccacggttctcttcccatctgtgtatacatatgccctgattgtaatcaggaagtcaaaacaaatcctgtttcaggaataaaggcatgaatcaaagagtattctaggtcccaacaatacattcccttcacataaccacctaaaggggccatcagatcccacaggtggaaacctccaaagagtatttggttcagaccctaacatcagaaaagtaaataacccaggtgagttgactttgggtcttacatggtttgaaacagtcttaaaaccacctagtctgagagcacatccaaagcaaagagaaaagcatcaggataaagaatcctgagtcaggaagaagctaatcctgctgatttaaagtcagctatatgccaatccatggctgaattccaatgcattcactttacaaagaaagaccttccatttcacagatcccatatcattctccactgggtggtagtgtggtgtggataaggggtgcaggtagacttgggctctggccctaactttagacaacttaatggctctgtgcacctgtttttctcatgatgatggtgtagtctgttgggaggatcagaggcaggtcactgaaacatgtggcacagtccttggcacacagcaggcactcaggaggtggtgggtattacaattaccatttttattttcccctcctcaattttcaagagaagaaactgacttcacagcagatggctacaaactgatttctccctgaaaaccacaagcaggtgaatcaccaacagcctgggaaagattctacccgggtgggattaagcaaatgaaccacaattgtattccactggcattaggtggaaatacaggggaaggatggcgacatgacagagtttctcttcctgcgagacgttctggccggatatcagaacaggctttttctttgcctgcatttgagctgtccatgcttacgactgctctttgcatcttaaaattgtcctccaaattttccattcacattctactttgtcactttcccacccattgctagagccatttattatttgccacgagtcagatgacctgggcagcgctccaagtggtgcctcagacaccagacctagccctattctcactgggcctccatcatctccattgtttaaaaaaaaaatgcttatgtttcatagactatacagggaatctacagagattaaaattagtgtgtgtgattttaaatgtactcatgtgacataaacatagaagcgctcggatacattaaattaaataggtgtttagatgtaatctgggcactggctagaggctgaggaacaggtagaaattcattcccaagaagaaagggagaaacatcttgaaaacctcagcaggtgatctgcctctcaccttacccctcctcttgcaagctgccccagtacaaacacagggagcacaggaatttctcccagacacccacaataaaactctaaacgcagcagtgtaaagtgaatctcttataaagaaacagtctaatgaggcagatgcaaagatgtccagacattgtatgttcaaagcttcatcggcctccatcctgcccacacacaagtcctcagccacacggtgataccgctcttgccaccatctgggggcaggggtgctccccaagtgtgacaatatcctctcctttaattaagcagactaagaacattttactagaagcccaaataatgaagtaaaattaaaatcaaggctctaaatcatggggttgaacaaaatgaaacagcaatattctggcttccaacatcttccacccagcttgcagagttagcatctgggtctggtttcaatagcagctttgtggcccagatgatcagcaccaccatcctagggccccctgctccagatgaggactgagtgtatgtgtaagcctcactttgaacctgaagcccctagttcttaagtcacctgtagactcagcaaccataattttcaatccatgagtctgatggaaataagctttaagactctttctctgattcttcccacagatggccagcctagctttccaaaacttgtatctaaaagtgcaaaaggattactcttatttccacaccttagagaatcactgcatatattcctgctcaaacacacacacacacaccctttctaacaaggatccacccctccttttccctcttactctactacctaatgaatgtacagctatgaattctcttcttcctctttcactctccctctctctcaggcacacacactgatttggacacatgccaacagttacccacattacatgggaagatgcacataatgccatggcctgggcagtaagtgatgggggtggcggagggttgaggtgggtgtggggtggggggaggaaggatctcctaggagtggaaactgaggacacaggtgggagagacatggggaagtggctaagcaggcaggccagcgagagaaactaaacagcagacaaatcacacctatgtaagaacttctaaaatatgctctaattttggtaaagaagtcaatattcactttatcgcttttggcaacacaggcgaaggaggggcaaaagtctgggtgggccaatattaaataggaacaaatagcagatctgcctcagcagtaaaggggggaagatgctgggccagtgatggtccagctcactgtgccactatgggcctcactccaccggaaccatcacacaaggggtacatcaggcactctctgagggccctgtcctagtgctaaccttgaggccctcagaagctcagtagcattcattcactacatctcctacttttaagatatatataaaataaaattatatggtacaaggtctatcagagtatttttacaggaagcaaagtgccatttaggactaggatagatgacaaaagagacaaacacatttatggtcagtaaaggactgctttccccccacaaaaaaacacaaaaaaaacacaagttacaagtgctccctctcacactgcgctctctcttcctccctcctttctcctccatccctggataagtaaggatcaggtgccagggagcaggggttcaggcagcatagtatactagaaagacaatgggacttacagtcaagtatttattggctacttaatattcccaaattacctaaccatccctggtatgttccctcatttacaaattgggtataaatgatcatcaaattacagagcagtgatcagaataaatcaaacagcattatagtaaaatgcctgcacaaaatgtctaaatgtgttacaatcccttctttgcacagtagccttagtctgaaaaccatcactcacacacacacacacacacacacacactccgtatacacaaattcacaaagccatgctcactgcctgtgactgacaaggaatgggggcaggtactagccctctggcgcttttatcaattgatagatatcaattggccaatatcaataattgatcaattatcagtattatccaccctatctgtctgtaattagtataaaacttcttttctctttcccttccctaagactctaccactggagctaccaatactaaatcagaccgtgtgaatgtgccctttctattccttctagttactctgaaatatttcccaggataagtcaaatgctggtagctgtttacctgtaaatgatggggtacagtataagcaatatgattagttacaaagtattggtttttgtctagcattacgggtaactttggtcaaaaaagaccaatacttttcaaactactggtatctaggaatctcaaatgcgagtcaaccagcatgtgtgatgaacacttaaaaaaaagagaaaagagccactgcattccagcctaggcgacagagtgagacactgtctgaaaaaaaaaaaaaagagagagaaaaaagaatgcattacatgtagaaggagtcagcactacttcatgaaatgtctatttcagttacataagtactgtacgtgtatgtgagcatattggttgtgatgtaaaattaacttcacatgatagatcagtcaaaagagtttgaaagccatggaatgtggcaaagaaacaagcagaagtcacaaaggcctgaattgtccccacaaactctgtccctgcaaatggagctccacagtgaatcccacattcttcctgtgtcctacagctgagaaccccaaaattaccggcctggaacccatcatcagctgccataccagattccccttctccagatcctaacccctttttttctccactccatcccacctcatcccagaaagcagccaatattttcccgcacgaacaggcactccacactccagcagctgccctggagacattgacagtcacacctgggtttccttaagccctgacaccacgactcctgcgatgacacctccttcccccaaccccgaacagcagagccactctcagagtcagaagtccctagctgaccctccaaggcttcctgggcgcgcagggtcgttcttccaccttctgtcccccgtggactctcacctggaaaacgcacacccccctgccgggtggttaggctaagattatgtgggataagactttaattctccaagcatctccgaaagacagcctatccggggaggcttctcctttaatcagccttcagctgaatccctcagccccatcccttaatgctcccggcgttaattcctcaaaataatgcagtcagagaaagtgaacttggccgctaggaaagttaccccagaggaagcgacggggagctagggcgagcggggagcgggggacggggtggggggcgagcggggagcgggggacggggtggggggcgagcggggagcgggggacgggatggggggcgagcggggagctcagggcgctcgcccggggggtttcctccgcacaacgtgaaaaatcttctagcccccaagaaaagaaaacaaaacccaacgtggccacaaaccggatgccctgtcactgaagtgcgaacaccactgtggggctgggactcagaggagaggaggggaggggagaggaggtcggcggggctggaacaaagccctcggggccgctccgagaggccgcgcgccagcacccagctgcgccccgagggagagagctgaggactggccgacccccgcccttccccaagcccgggagcccggggccggccctggtgcggggtgcggggccgggagggcaggtgcgcgcgcagcgagcccctcccccgcgcccccaaagctcgggggcaccccgaccctccccacgcgcctggccccggcgcggccctcacccgagcgggggtcgaaggtgaccacgaacacggccaccacctggtcctcctccacgtcgcccagctccaggcgcccgggctgcagcagcacctccggggcggccggctcctcgggctcccgcctccggggcggctccgcggccggccgggcgcccccgccgccgccccggccccagcctcccgcctgcggctgcggggcctgcggcagggagacggcggggccctcggcccagcgcagcagcggcgccgcgtctccctgctccaccatggctaggcgaggcggagccgcgggcgcgaggggcggggcgggcgggctgcgggaacccccctcgcctggccgcgccaacgccgccgccgcccgccgggtctggcgctgcccggggccccgccgcggaggcgcctttcccacggagccagagcaggcgtccgcggagccggcttcgggaaccgcgagcctattcggaggcgcccgtgtgcacgtccgtgtgtgggacgcgtgcggccggaacgttcatccttgcgtccatacacctgtgtgcgggtggaggtgccttctcacctagggttccgtggtatagctaccactgtgagtttttatgtcaccattattttttaaagtccgctggtcctgtggaccgtgacagatatgtattacataatcctggatgtgtggcagaagctgcttctaagcagaggagtgaagcagaggtgctctggctacccaggtgtttgcaatatactcatcaataaacactgaaaaggccatagggttaaagtttgggaattttgttcttccttttatattacaaactgattaggatggagattatgagtttatttcctggtatatatacaacttgagggtattaaattaggaggtgctggagcatttgtgggacgagggatattccctcagaagatcaggaaaaggaagttgctcaggggagaaagaggaaagtcagctctaaagctgatggctttggaaatggattaggggttttctgtgaacccccattttatatttaaaaataaattttacatgcctcaatccttgaggtaaatctagcagctaagtaactctttaagaggagatgtgtataaaaataggaatagctattaaaatagaaagaaggaggtggcaagagaaggaggtacacagttcatccagggttcagcaaggctccatggtttgcctgttcgcaaaaggacccagtagagctatgtgctgggtgctactccacgggatgtttatgaacctccgtgtcctacacgtcagcactgcaatgataatgtgatttaacccctatccctaagaagataatcaatgactgccctaggctgccacttctaatctaaaatctatgatataacaataaagaatgtacttatgcagcattttacccccaagaacagggtctactttcattatttacatatttagttcagcctttcctgaaaggtaaaacttcagcataggaatctcttgattggatcagaaggatgaagaagtagctgtggatgtttgaccaagttactgatgacctccagagctcatcccttggagcactgacagcaaataagtcaagacggagcacagtagagatccatctctgagaatgtctcctccatacctgctcatttcttcccagtgaggcactgtgtgtgtgtgtgtgtgtgtgtgtatgtatgtatgtgatgtgggagaggcagaaacagacatacacacatacatacacacacagagacagacagagagagagagagatct

SEQ ID NO: 147 - DNA, 220599 bp, Homo sapiens
  source 1..220599: mol_type = genomic DNA
tgcaaatttaaaaaaaaaatttacacatacacatcttgtgatcggatcacatgtctaaagtggttctttggagccatgctgaaaaaggaggggtggagaattggggaggaagggagagagagcgcatgtaccttttagccttttaggaattaaatctggttttttgggttttttttgagatggagtctcaccctgcgcccaggctggagtgcaatggcgcgatctcggctcactgcaacctctgccttccgggttcaagcgattctcctgcctcagtctcccagtagctgggattacaggcaccccaccacacctggcaaattttttgtatctttagtagagacgaggcttcaccatgttggccattgctggtcttgaactcctgacctcgtgatccacccgcctcggcctctcaaagtgctgggattacaggcatgaaccaccgcgcatggcctgtatttttcttattaaggaatctggttctatgactgtcctaagcccaggctgagttaagagcgacgagttctggagggaactacttcccactctgagtcttctggttgtaatccttgtcttttctcttgatctgaactgaagactcatgaggcttcaatctctgtcctagtcctggcaaatggcagagccagaaaatgactttgccttcccagaagacaaaccctccactttattctgtgaggctgacggcaggcccaaaccatggacaggttggggcctgtgcaggcctcagtggagatggggaggaggaagaggggaaggaaacttaggatgggatcatctctcaacagggtggaaggacaggaaaactttactcatggttcaaatcctgtcagacccaaacacaataccaaagaaaatagttgcagcttaatgcctcacttgggagtttgcaaagtctctgctctccgaaggccttggtgggtgaaaagcctaaatcgtccttatttcccaccttgcttctctccttcctcttccatggaatgtaaccgtactttctgtatgaaaacctagggttccaatggaaaaacgattcacagagtgacatgcaagagtcacagggagtaggtcagggctatgcccaagcctgggttggcattagctgggctttactctaccaatgttaggacactcaatgacatcttaggggcttcaggcagaagaggaaaatgttaagatttacctaataatggggccgaagggcaaagagcattctttccatcactggaaacacttaagcacaggctgaacagttgagggaagctgaactactgcaatgactgggtatcttctaactcttaagaccggtcatgcaacttaggctggagaactccatttcaggggaggtcagtgactcacactgaagctaaccccttaatctagtactcagttccctgtgtgatggtgtttcatccctgactggccagtcccagcccattcccaggagagagaactagataacaaagccaaggaacacatgaggctctgggcccaaacaactgtacattgtttattgagaacacccgtagatgggaaggagggatgccctgtaccgcatcgtggccaccactgactgggagccaggcccagagagcactggcagagctgggggtgggcttcccatgacacactgaccatctcggagggtgggaggaatgagaggactaggcctaagaccctggtgccatgctacaaatggggactgattggcctttgcctttcaaaaacagagggtatgggtatgcggactaccagcaaaaaatagaaacttgatttttttaaaaggtcctcctgtacataacaagacagcatctgctctccagggcccgggactggcagcggggacctcaggcaggcaggcaggccgaaggcctccagggaagatcagtggtttggctgagacagtcagctgcacaaaactggccagtcacgagcacccagcgaaacttcatccatgctctggcaggacaggaaagcacccggccccttgggaatatacaaatatttgccatattctctttgcttgttacaaaaaacagttaagaaagcttacagcagattatttacaaacagtatcctgggatatgatgaaggcagaggtgggctggcttggaggataggatctgtgggggcagaggagccacagcagcccagagggtcccaggctgggccttctccccaggcttcaggctctgcaaggcactggactctgctactgagaaggaggcttaattcttcttgtggagaaacttcattttgttgcctgtgggccagagaggacaagagagaatgttcagtgttatcccttccaacctccactccctctcctccttgtagccctaaccctgtcagtgggagaggaaggattaggaagactggattataactgtgatctgatccagggtagtgaaaacacgtgagagctctaattagggcaccggtattaatcactgtgtggttttacgcaagccacttaacctctttggtctcaatttctctttaaacagaaacatgctatgattctctgatctggcgggctgagcaccctgcagggaggggtgcattttgcaggaagggcactcgcactgctgtgtctgcagacctgttatggtctagaggaaagctcactggctctaatggccttcatattcactcaggaaggagtgcaaacagaaagacctgatgtatgtgggaacctgggattcctctttgtaatgcaatatggtaaatacagcctgtcctccatatccatgagttctgcgtccatgggttccatgtttatagattcaaccaactggagatcaagaatatttgggggaaaaaatggatggtggtgtctgtactgaacatatatagactttttttttctcgtcattattccctaaacaatacagtataatatctatttacagctgggcatggtggctaacgcctataatcccaacactttgggaggtcaatatgggagtattacttgagcccaggagtttgagaccagcctgggcaacatagcaagacatcatctctacaaaacaaattttaaaaatagccaggtgtaatggcatatgcctgtagtcccagctactcaggaggtggaggagggaggatcacgtgaggccagaagtttgaggctgcggtgagctaggattgcaccactgcactccagcctgagtgacagagccagaccttgcctctaaaataaaataaataaaatataaaataaaataacaaaatttatattatattaggtattataagtaatctaaagatgatctaaagtatatgggaagatgtgcacaggttatatgcaaatactatgccattttatagaagggacttgagcatctgtggattttggtatccttgggtatccaggaaccaatcccccacagatattgaaggaccactactgtgcaaaatgcccttggaattctggctgagaaccttctagtcactatgggatgtctacatcctgttctgtctacagccccagtataacacctgttgacattgatttagagtattcgggaacacaaatctcccagccccttccttcttgctgaacatctatctcatcagtaacaaggccacttacccaaacctcggagaaacttattcattccactctgctcagtgtctgggagttcttctaagtactgctccactcgctgctcaaaaaggcctgggtaaaagaaacaggcacagggaagagaacagtcattggaggaagggaaggagaggcctacatgaagggaaccatggagcacagatgccaaaaaaggagaaagaaaacatctgggatgataatttgcaggagcatcttactagaattcgggctggctcatcaaggcgatcattagtgacatcttgccggggtttgctgctgccaccctgcctccccatgcacattcccaagctgcactaggtgaggaggctgcttctcagttcagagctgccccaagtggacatctctagcttccttcagacaactctaccatgttgttccaaaaaggttgttatactaaatggatagtattagaggacagaagaagtactaaccctgaggttagacagaaaaattgtgatgagatgaaaaagccctcgaatgagctgatgaaatagcaaaaaacaagataaccatctgccttaaatgaagactgccaccaacctacgacagctggcccaatgctctgtaagggaattcccaaccactgggttctcagaacccccgaaattgctcagtctgctccttttctctggatagaagggctttctcctatctttctctttgaggagggggtgggcaaccaatggcatgctgctcctaggtggagatgagtcctacctctagccatgtggcttagcttgtgcatagccttgtgaaggcatttactggggccggaggagaagaatgctaccttgaagtttctaacagaggtaaagggatgttaagaggcctggccctagctgatgtccaagagcttccatcatagtgcctggttcttcagccctgctgtgggtgaaaaaattagagaagagagctgataaccaagacttaccctttgcccgacactttcttagctccctgtcttggatgaagccagcaaacatctgagactccataaaaacctcaagaaagcggcggatgcttttggaggccacagatttgcggaaggcctctcgctgaaaggccctctctcccttctcactctgtgtcagaaagagggagtagtgcccaacggtctccacaaagaaccggataaacacctccgacaccagcccattgagggtattacattctggaagggaaaagacaatctttgaggttcaggtcaagagcctgcaaagccttcctcaatcttcctggtgtagtcttcctctccccaacaagacttccagccagtaccactcttctgttctggaagctctttttgagaccgagtttcactcttgttgcccaagttagagtgcaatggcgccatctcagctcattgcaacctccgcctcctgggttcaagcaattctcctgcctcagcctcccaagtagctgggattacaggtgcactttttgtatttttagtagagatggggtttcaccatgttagccaggctggtctcgaactcctgacctcaggtgatccacccgccttggcctccccaagtgctgagattacaggcgtgagccaccacacccggcctctggaagcttgctttcttgtgctcatagccttgtaactagcctacgagctgcagaaggccagaaactatgttctgaacatggaagttgaaacataattgctggatgaattaaagtagaaaccagagcaccactttcatcatatccctcaccctaagtgatttttctggcttccaaggaagaggaagtgcctttcatctcctgcaatggcttgaggcaaggcctcagaaggaggaataattagttttctgtcagcagaaagtatctttggggttgccacatgtctttgggttttccttcctaaactacctggggtagaaaagacgctagagtgagaccaaggtcctcatcagccagaaagggtttggtgtgcagaggcagagttctggccctatggggccctgacccagagcagagggagcctggagcagagctgaccgtgcccgggcactattctcaccatcgtcggagtcgctgtcagagtcctgggagatcagctcattcttcctctccagagcctgctccagagctgcctgtaacttcctaggtaacaacgtgtcttcgtcgtccatctgcaggagaaagaaagcacagtgacaatcatagctgacactgagcacttactatgtgctaagacctgttagaagagcgtgagtagataatctcatttatctctcccagtaaccctcataactatcatcaacctcattttaagatgaggaactgaagcacagaaaggttaagaaacttgcccaagattacagagattaaaagtggtagagggtcaggcgcagtggctcacgccagtaatcccaacactttggaaggctgagcgggaggatcgcttgagcccaggagggagttcgagaccagcctgggcaacttagcaggtccctctatctgcaaaacacacacaaaaaaacaattagtcaagtatggtggcatgcacctgtactcccagctacttaggaggctgacatggggaggatcacctgagcccaggcaggtcgaggctgcagtgtcatgactgtaccactgcactccagcctggatgacagtgagaccctgtctccaaaaaaaaaaaaaaaaaaaaaaaaaaaaagggggtagagccagtgtggcattcactggcctctgtgaccaggaccagccaggggttcctgattaggtctccccaattcctccatcttcagctccaggcaggaggcacagttggcttggggcagggggactgtggccagcctgtgtctcaggaatgaagttagactgttgtttcgtctctatactctgtttctgtgtccacatcactatgcctggtacccagggagtcctcagctccgtcattggtgtgtaacagacaataagtacatttccataggggagagcactgggttgtgctcctttgtagagagccaggaggatttccacgactaacaaaggctttttgtagttgacaacaatgattgcaaacctgtacgttacataacaatctatagttatttgtgtaacccccagcaaacatttcaaggcaggtgttgtcaccacctctcctttagagctcagaagaatttagaggcctaagaccatgtggctcaaagggggcaaagtccagtggccaagtctgtggactcccaggccgtgttcttcaaattcccacactgccttctagaagctcatgatgtcactggaaaggcggaccctgctaaggtcaaggattccaagaccagcttctccccacccttgactagtctgtgagtagtactgaacccagagagagagctcaacaaacaggttgtgaaggttgagtagtgtgtgtgatggtgcagggtgctcaggagcccaactctagcaagcacccaccctcttacctgtcggatgaatcggtcagatcccagattcaccatcagcgcctgagaaaaggagtcattagcagagtggctcagggcatgagtcccgcaatgccctctgccaggcctccagacctcccaggttcccagggtcagctaacaggaagtactccagccggggatagacctcccagggagaaaggataagagcctggtaaagaggccgaggggccacaagtaagatcccagcacctgcttccccctccacccttccccccagctggttcccccggtggcccacctcctccacaggcagctccttcagtttggggagggagctggagagcaggccaaccaggaagggggtgggacagcagacgatgtcaatcatggaggccgggaggacaggaatgaaggtgtgctgccaggagaaggggtagagcaaggccaccaccgcgtgggagcagctggagagggtactgatgggcagacagagagacagagtacctgagcccaggcccaggaacttagagctcgctggaggctcaggacagcctttgatcgtaaacctcccagtgcaacaaaaatgctaatggggttcagggaccctgcagactggtaaagtccccgctttcccactgcgtagcgcctcaaggacaacaatgctactctcttagggaaatgtacctgcaaacagccaggaaggtatgcagcaacccgcaggacagtcatctgacaaagatctggaaaagggctgtctcgggtttggggggcacatcagtgggcccgtggctgaggaggcagtaggttttgtaaacccctagggccagtgaatgcagatcgtgggtaccctctcccaccccacatcagaactaggcaagagggacaaagaacttgtggaaaacctaaaacatcagcaacggatcatgagctggctggacctacccctcccctctccagccagaggcagaccccaggcagaacaggaaggacatcttttccaagaccccagattggcagaacttgaatacccggccaggccaagaacaagaccttgggatcgtccctcccagaatggtcctggaatgtgctcagaggcagctgcaaccacaggaaacaatagctgtattcacagccccacgggagctggcctgggggggggcagggtggcaaagaggaagctcagccctgaattagagggtagaaccttcaggaaaagaaacctcatggtccaggctctcttaggggccactaaggtcaggccaggccagggcaccaaagctgggcagtcaggggctttgttggctgacaatgaccatggctggtacacaggaggggcctcttggaactgctgtacccagctcattccagctgttgggctagatttcttcacaagggcctgatgggcccacagaacacctagaagtgtgagacacagaagcattgaggctgtgatgggaacaagtgaggggcagttttcctttctaaaccctggtgctctatggaaaagtcagcagctctggtttttcttcctcctttcttctcctgggctgaggatgggcctgcgttcctgtccctctgaaggcaatcgggagttcatttctcggtttcctctcaactgcttcctcatacatacggaaggaaataccccagggattcaggacttattggaggacaaaccagaacggggattttccttcactgccctcctgtgagcacctgacatttaaggtggcttaatcaatgtccaaatgaccactctagagaaaccactgcttgggatggattctttgaccaaaacaatatgtaacatgttgccaataacccatcctgttgttgtaggacttactaagaaattattttatggagagaggaaaagtttttgtttcctttttttaaaaaaatttttaaatttttatttatttatttattttgagacagagtgtcactcccaggctggagtgcagtggcacaatctccgctcactgcaacctccacctcctggattcaagcaattctcctgcctcagcctcctgagtagctgggactacaggcccagctaatacagggtttcaccatgttggccaggagagtctcgatctcttgaccttgtgatctgcccacctcggcctcccaaagtgctgggattacaggcgtgagccactgtacctcatttcctttaaagcagctcaaaaatgtttcttgtctggaaagaaagccccggctcttagagccaggcaggcaacctttgatatgcaaatgaagaccattagaaattgggtccacccaacatggcaattcccaccgttgtcctcttgcccttgcccctacaggtgcctagcagcatggctgccccgcatattcccacgtgtgtagaacatcaggcgccctacattcgcatattaaaaggctaggatgggaaggccagcttccgggggggggggggggaggggctacatgaatgacatgcctggtcaaaccaatcccctaagccctatgcaaatcaaacaccgcctcctccagccttcttatcaaactggctggtatccacaacacttggggttccctctctcggctttggagcctctctccctctgtctctgtactttcttctttctgcctttctccttcccttcttgcctattaaactctccgctccttaaaaccactccacgtgtgtcggtgtcgttttatctaaaccagcataagaaccaaaaaccctagtgttcctgcactcatcggagccgtatcacttgtgccttgcctgtgtcaccccctaaccaccactgacataaaacttttttcttttttaaaccttggctgtctagaagagctccgacttcttacttcctaaactgcctcacgtccagtgaccatcacttctgccacccctcccatggccaccaccagaccttctcgacacctctacctctaaaatcataaatgccagcatttcagaccaagacctgtgacccatccagctcttttcttactcctcctaaaccagctccccgacttccctggcacctccaggccctgcacatcatctgtttcccggtgtgggctggccagccttcctcacccactctcctctctgcacctcagtgcccccatcacatccttctccccagccctcccattgcccagccctgggccactgcagttgccttctccaggggacaccctccacaggaccctcgctggctggctcagcattcctcacactgtccccggtcagtgctcttgccccttcctcacagcagctctttcctcaaactcagcatcccattgagatggctttgcctccccctccagaagaaatgcaaccatccaccaaaaatctcaatttcttaacctttcccctttacatatcccggcacctgcacagtcttggctgttgcaaaggaagaaatatccctccctctcccctcaggccaagccctccacagggttctcaatcctgccatctgtgtgctcccaaaccctgctccctcacccacacaggggtgctacctttccacctagtcttccatctccctacgcacagccccactccagcactggtctccggcgcctgcttaggctcctgaacacttgctgattcgcttgtgggtgtgccttcccccctcccttctgctttcttgcccggctgggccctacctgagcttatctgccacaaaaatgacccggcgctccagcagcagtgaggcaaagattcggatgagctggcgcacactgaggcaggtaaaaaggcactcaaagtccacgtgctccagccttgagtccatgggccgccgcagctctaacacctgcaggagagcgatgggaaagtgggccggggccagccaagtgggtgctgccctctggccctccacgaagcaactggagctgctttccccttccaacctgctcttttccaggtctctcgtctaccctgctatgcagtaaacccctcttctccatccctcggactacagctctgctctcgtagcactcgaacacccagcctgtgggcaagagggctgcctgtgaaagcggggaaggctccagaaggaaggagttgaggggccatccatcgggacctcaggaagagaggagagctgactgctcttagagatagggagaagaagggaaccacacagccacatctctagggtcctcctgcccacctccccagacaaaggtctaagcccccagtgctgactagaccccactgctctccaggcatctccgcatcccaggactctaatcccagccattgcctctggaagggcaatgctggggtccttgttgccctgtccccctccctttcctgcagaaagagtttccttccagaggctgtttgtcctgctatcctggcctttatctccatcaccctaagtcccatgccagtcacaaggaaaacataagcaaagggctggccattctgcagccttgccaggaagcaggactgtcttatcagggccaggcctggccctctttcctccaaaggctgctcccaaggtgagtgccacagctcagagagccacttctctgggggagtcacaggggtggaaggtagtgagtgactccagcggtgagggcaggaggaactgctgacgctcaggccgtgccaaagcagctgtccctggggtctgcctggcctcctccttggtcccgcagcatgtgtgtgcagcatagatgtgcaggcctcctgaaaactagggtgagaaaccagttctctctcattgccccatggcatcaaaggtaatgctttacaaggagtttttatacccacgtcatctcatttgttcctcagagtctaagcaaatgaaggagttctaactcctaactcagcatccatccttctgggccccagagaagcagcaaaatgggcacagggcatggtaacggtctgtgtccactgtctctcccgcctgatggtgtactcccagaaggcccagtgatccgccagatgctgggtacaccccaaatggtcagtgaacgtggactcacagaaagaagtagcacaatgatgccagagccctttatacctgctccaggccctgtccccgccccaaaattcgcaagctccctgcatgcagcccaacaggctctgctctctagcacccagctccagtccctactgtccctggggcccaaccctcccccttcccccagggattgagaattcacacaggctgctcccactcccggccttgttccctgcatccctgccttcaaggagatcaagcccagggggctgaaggagctgagtagttacagcctgggagtccagtgtcaggacagaggcagatgtgaccaacatctgcacagggacaggcaggacatctagaagggcagccaagctcatgtgggtggggagaggtcagggaagcctctcagagcacaaggtacttgactccccaaagagaaaagaagagaagtgtcttctaggcaaaaggaagtagggttgaggcaacactaagtatcaagtcagaagacgagagcccagtgaggtggccagggccagaccatgaagagctcccaggcatgatgctgcgctataagggaagggtcccctatcctgtgccccacagccaccatgaagcctaaagttcctctaaatgaaggggagaaaagaggcgaggagaaagccctcaagctaggatttgccactgctcagcaagcctggtatgcttttttggtcagtccctctcccactctctacaactaatttatttattcttccctctcctagaacccaacatccacctcttactctcaaaggatgaccttttctattttgacatatgtatttttttgagatggagtctcgctttgtcgcccaggctggagtgcagtggcgcaatcttgactcactacaatcttcacctcccgagttcaagagattctcctgcctcagcctcccgagtggctgggattacaggcatgcgccaccacacctggcaattttttttttgtatttttggaagagacagagtttcaacatgttggccaggctggtctcgaactcctgacctcaagtgatccccccgcctcagcctcccaacgtgctgggattacaagcacatgagccacggtgcccggtctgaccttttctactttgagaaaatcaaagccatcagatgagaatccaaaatctactaagccactccctcctctcctaataaacaccaagccctccatggagcctaacacccacatcttctcagtactctctgctagcccctcctgctcctgcagctcaaacctcttcctctggcagccattcccaccagcatacaaactaccatccctaacaagcttccctagttccacatttcaattgctgccctcttccctatttctctccacagccatgcaatcttgagaagatgtctacacaggctgtttccacttcctcacacccatcacttctcaactcactccagcccaacttctgggcccctgcacttgtcaagatcttgccacgcctcatcctgacctcttggtggttcctgatccggatcacggcttcctttttgaggtgctcctgagccgcagccctctcctgagtgttcctctcctgcagggcctctgcacgttggggttccccaggactgaggaggaccccatactgggctctcttctcttccctatttacactctttgctactaaataccttctcttgggggtctcatgggcatctcaaacttgacatgtacacatttggactcttgctcttcctcctcattacctgcttctccttcacgagctcccatctcagtacatggctccatcatctaccctggggctccagccagaaaactgggagtcagccttacagtctctgtaacaactactccctatttccaatcaaacgcaaagtgctattggtcctaattctaaaatccatctacttcccttcccctgttctaccacatcttaatccaaagctgccatcatctcttacccatagtgccacaacagtatccctgctggtctccccgttttcactccgaccattatctacatggcagccacagtgggctttgaatacatgtatcagctggccacaggtggctcacgcctgtagtccctacagtttgggagggggaggtgggaggattgcttgagtccaggagttcaagaccagcctgggcaacagggtgaaaccctgtctctatagaaaatacaaaagtcagctgggtttggtggtgcacgcctgtagtcccagctactcaggaggctgaagcgggaggatcgcttgagcccgggagggtgaggctgcagtgagccatgatagcaccactgcactccagcaccactgcacaatatgggtggcagagtgagaccctgtctcaaaaaaataaaatgaaatgaaaatatacgtcagatcttatcatacccctgctttagataaaaccccaaatccttaacttggcctagcagggacatcgtgattgggttcttgcctgccaacccacccctctacccccaccccatcaaccctctgaccagcatttgcacttgcccaacttttgcctttgcagatgctggttcctctacttggaataatcttctcccgttcatatccttctctttccatctccctcctcctgcttcatttagttgcccccactcaccacttaggtctctgataaagtgttactttctcagaggagaccttccctggccccttatttaaagcagactcccctgtttcacactctcataaggtcctgtgctttcacttggcttgtaacacatttaggaattatctatttatatgtaaaagtgtttataatagcagtatctcccactagactacaaacttcatgaggacagagccacgtccctctacctctgactctgctctgaggtctggcgcaatccctgattgtgagatggcacacattcagtaactgttcaatgaatgaacaaaaggaaggcagatggaatgcagtttagtccaaatgggtcagggaaggcccctgggaggaacagagggctggacaacatgtacattcctattgtttgctcttttggtccctagtgatggggtacacagacatggttgagcaaggagggaccgtgctctgcaacccccaaagactacgaccttggccagcatggtcctcctgccaccccagcccgtagcccgagagaagagggtgcagaaatccctacctcattgccagcacctggcaggaatgtcttcactttgatggtcttccctggggctgggaagggcgactccatgagacttctcatgaaaggatagaccaatgcagcggagatcccacgccggcgctccacctcatctaggacctgtgcccaccgccagcagcccaaagaggaagggtgtcagggcactgcccttccccctcctggcagagaagagggcagccaagcatctgaccaggctagcccagaagctgggagacgggaaggtggtcttgccatgatctgcacactctacccttcccgttttccttggcactcagtgactcctctgttccctaactggccttgcttcagtccccaagagcggagtagctgggcaaaggaaataccacccaagagtcagctccctgggcgctcctgcttccccaaggactctggctctgcctagggcccagggtgggctgtgacaggggcagacactgccagcacaggagctggggaaatgccagccagctgggtagagaaccaggccggggaatgggagggtgtcagagagctcactggtacttgttcctgcattctgtctcccgctcgctcacagtcacaggtggttttctcatctaagctggctgcagatactcctgtgggagctgtcagctgggggacggggagggaagcctgccagagcctcttaccttggaaaacaagccgaagcagccaaggcggctgatgacacagtacacctctggcaaccggggccctttcccacttggctgggccaggacaaggaggaggaggagagagacagacacagagaatgcatgattaccatttctggctccttttccttgggaacggaggagtaaggactgcccttctagtggaggaagactttaagcctcctctaaacctctctgcaaccagagccctgaaggaacagccaccactctcaggacaggcctcagctctgcagggtctcccagcaccaggtaccaggctcctgccaggctccacacaggctccacccttcctcccaggaggacgctgacgggggctggcaaagggcaaagcagtttggcagaggctacagggtgtctgtggattcatagccctgaggctgggaccccagcagatgggaaggactagggtacatccttaggacaagccattgtagctttttagccccatagggcacattcggcataccattcctttttttgcttcttttctccctttcttgatccacctccattctaagagagcaaactgaaaacaagagatgggagctactgtttatggaacatttgctatacctgactcctgggcttgggactttacaagagatttgtgagagagggattattatcccctttatagatgaggcaactgagttcaaaaagataaagccattgcctaaggccacctatctagaagctgtggagccaggagtttgctttggccctgtttggctgtcttacccctaaagcctgctgctttctgacaggaaggaaagaaaacaaagacactgggtagaggtttgctatggagtaaaggagcaaaagaagaatgggacttaaaaggtaggcatggccaggcgcggtggctcacgcctgtaattccagcactttgggaggccaagggaggtggatcacctgaggttgggagttcgagaccagcctgaccaacatggagaaaccccatctccactaaaaatacaaaattagccggtcatagtggcatgcgcctgtaatcccagctacttaggaggctaaggcaggagaatcgcttgaacccgggaggtggaggttgcagtgagccgagatcacaccattgtacttccagcctgggcaacaagaatgaaactctgtctcaaaaaaaaaaaaaaaaggtgggtagctaaaggggagacatgcactgagagctcccaggcccggagcccccatgcaggctgcagtgccttctccagcaggactcagaggcctggagggcctggcaagtccgagtggggagggagcagagcagcaggtgctggcccctcgtgcaggctgctaagcaaatgcagatggggctatttcagtctccaaacctgctggccacacgtcacagatctaaagagaaggcagaatctgtttttgtccatattaggcctgaaactcactcctgtctctttccctctcccccgcctcccctaaagccccaagtgattaaatcaagtatgtgggatttggatcagaatcattgtgtccaatctgcaggaatgccgagctagtgccagcccccttggcagagacccagcccaggccctctctgagcacgccaggacaaacacgctcttccctgggggcagcagccccactacaaaggagcagctctgctccatctatgttccagcaaaggcagccttcgcaacactccttccaagcctgggaggcccaggcggccagaggcatgctggcctctgcctggctcaccacctggcatcactcctgtgcatacgccctttgcccctccatgggcattctacctccccacgccccctctccccagtccatcctctgggggtgatccaagagtacaaattggtgacaaacgacttcccttctggttctgtatgaccttgggcaagtcattctacctctgagttttgactttccaatctatggatcagggataataataacccatgggctattgtgatcattttcttttaaaagacatacttgaagcatctagcttggaatgtgacaggttctaaacaacatttattccctcttattcccttggcccttccctcctgtgttgaaagtccaatctcctgtaacaggccatctaaagttcctcgagagggagatccatgttaaactcatctttatatgagcacgtgcctgactctcaatagcacgtgcctgactctcaataggtcagggcttctgataagggatgataagtgtttctgaatgaatgaatggccggccccaaatccttccttcagggctcctgcccccttcatctacccctagactggtatctggggaggctttctcttgctaaggcctggaaaccccaaaacattgtcaacaacccagtagctccaagctgggagtgcagcaggggccaggctctgagcctctacccaatctatttcccaggactaatgggaagggaaatggtgagggacttctctttacaaaatggctaacattttcaaaacctaatccctttcccctagattcaaggtatctctctcagattcccagagaaggtatgtctctgtccctgcccaatctccagccccaccacaccacagaaaggcctcctccccactacaggctggccaggtatgggggtgaggaaggttgtccctcacctaatctgatgcatatacacatactgctgggggcgattcgatcctgcaaccagagaccagcaatcagagcccatgatcccaagggaaatgacgaaaaagtagagaaaaactaaaaagacatgaaaacccactccctccccttactccagataacctccgatcctaaggccccctcagaagcaccactctgagccctgctctcccagggtagcctcacctgtgaaagtgtgtgtgttggcagggggttcggggtggcctcaggaagcataacataggatttcatacaagctaaaattgcagaagggcacacacacacacacacacacacacacacacacacacacaccctggcctatcccctgcctgctggcctgaggaccgaatggcctcactcaccagtaagcgcctgcagtagccaaagcgtctgctgccatcttccccagtcagcatgaaagaaaaggtctcactggaacaaagagaggtctggcatcagggaggtgtgagaggacctaggaaacagcccccaagaatagggaccgtcattttcacgtggggtgaagggccaggttgctgtaggagaggatgagactagagcaggccccactcaggtgcccacgctatgggggtaaagaaggctatgctccttcctccctcaggccaggccaggcctcacctgctatactctgacacaggaagccagtccttggcatcagggaagcaaaactggggaatggctttgagcctttcctctgcctctcgcatctgcttggtgggtcggtccagctgcagggaagaaggaaccaggagatgacatggaacctgagggcgggtggtggtggctgagaagcccctcctcccctgagggccctagatgccactgactagcgggcatgatctcagcaacccttgtcccactccgaattcttacagagcccagagtcatcattcattcattcaataaatgccagcggagtgctttctatatggcatctgacacggtgctatgcgccagggctcttggctctcaatggaaaacaaaggggacaaggtccccgaccttacacattctcgtcagcagagtgagatggtcaaccacaacatctcagagcggggcttaaaaaaaaaataagcagggtggccgggcgcggtggttcatgcctgttaatcccagcgctttgggaggccgagactggcggatcacctgaggttgggagttcgagaccagcctgaccaacatggagaaaccccatcgctactaaaaatacaaaattagccaggagtggtggcgcatgcctgtaatcccagctacttgggaggctgaggcaggagaatcgcttgaacccaggaggcggaggttgcagtgagccgagatagcgccattgcactccagcctctgtaacaagagcgaaactccgtctcgaataaaaaaataaaataataagcagggttatgtaccagagcaagctgggcaggggaggggctccatgcaggtgtctggacagacctcctgaaagaggtcctacttgagcagagcctgagaaatgagaaggagccagcagccacgtgaagagctggagaaagcacattcctggcagaggcaatggcagagagagaggggttgagtgtgagaggaagaagagggaggccaggctggctggcgacaagcagggaaggcggagtgagagacaggctggtgggagaagtgcggagtgacagctagtgggtgcagagtttctctttggggtgataaaaatgttctaaaattgactgtggtgatgattgcacaattctgtgaatacacccaaacactgaactgtatacattaagtgggtgaactgtatggtattcaattgttctggattttattataagcacattgagaggttctttcttagtcctcatcctttgaacaagcactggcccaaacccacccccgctgcagccctgtcttccctcctggctgagaggaggcaggttcagggctgtggcagctcggtgaggacgtatgacgaacaagatctctctccttccccagataggcctggcggatagaggatggaagagggggaatatgggcaaggtggggagagagaaggcctcaccttgggaaactggtaggagacttcggggaggtaggtgtttcgcgatggcttcttcttgagggacaccaccacaaagtactcaaaaagctcccgctcctgccactccagcagctccagctccagcgtgcgatagctgggggcgcgcttcagcatcgactggatgtggaccaggcgctgtgtgtgggctggaggcaggttgcacatcagggaatggaccctcacaggcctcatgttaactcctctacccctggctcagggctccattgctgtggagcacttttaagtacgtgagcctagtctgataccatccccagctcacagtgcaggaggaccggcaggcacaaggtgctgacccctgcacaaagactctgccctgacacaggaagctgcgggcctggtcctcctggagcctctggagactgagctggggcaggaggactgccgaggccaggcaaacccagggatgtatcttggcacccactctgtccctgtaccaaaaggactagaatacacgaacatccacgaaggcttcatccttgggcccctagcaggacatgctcctacatccaaagtccacttgcccatttgcctggggatgagaggataatcatccaggaaggcctaggcagggtttcccagtagagaaagcacaaagatttatccaaggaccctggaatgtgaaggttccagaaccttttcaagctcctctctggggacaggggagatgggggactgcagggcctccagagaaacagtttcctcagtctacggcacatttcttgccagaagaggtccttgtaatcttctgtacccctctctgaccctccagatctacaattttttttttgagacagagtcttgctctgtcgcccaggctagagtgcagtggcatgatctcagctcactacaacctccgcctcccgggttcaagtgattctcctgcctcagcctcccaagtagctggtattacacgcgcccgccaccgtgcctggctaatttttgtattattttagtagagatggggtttcaccatcttagccaggctggtctcgaactcctgacctcgtgatctgcccgccttggcctcccaaagtgctgggattacaggcatgagccaccgcgcccggctgagatctacaacatttaccaggcaaatctagcacccaactcccatggacaatggcttgggacagtttgggcaggtcaccacccttacatttggcaaagggagacatctggatttaaccttgcagggctgagctcacatgtctataaggacagacttccctgtggctccctgctctattgttctggtatctggcctgtctgtcacctctccacatcaggccggttagggacactggaaccacacatgcatcggaagggaaggctgattccctgcagccctgctgggagagcttccgtactcatgggagctgtgcctcacctttgaacctgtcatcagagtcgctctcgctctcactgttttcatctggaaaaggaacagcagagtacatacttgctggacctcacagccaatgttttttgctcccccaccaccccagcttttctcacaggggatggatctctaccttctctgggctactctgggcccatggtcaggcatctgcaggcagggagctgagtggcctggggccaggctccttcagagctcacactgcgaatcctatattcaaacccatgagggaagctgagggcctgagttggaggctgagccagaagaggggcctacaggcctggaaaagatggaccctgcctccaggaggtcaagatttgaaatgggaaacagaccgcaatgctcagtgagtctggcctttccttttgcagaagccgattcccacacccacctccctgctcagggcctcacagcccaaagtctgaaggaacccatcccagacctttcttccctgtctgctcctccctcctacgtggccatttcctggcagggctctaccctccacaggtaaattgatgcctctcccgttcctaatgcccaagggccccaaacagctgaaccagctctggcaccaaagcctacctctcagtgatgctgtttcaatgctggacatagacaacttttttaatctcttctttcctctcttggcattgtagatggagttaattctttggacaagctgggtgagaaaagcaggatgggtgaggtaaccttaacaccagctgccctacttccaagaaggctgagtaggagcccatccctgcccttaatggtacaagctttctgcattgcacccgctgggtccaggactggtctaactgcagaaccgacctcaagtggtgactcaccagccatgcatggtagctctccatatacctagtcccccaggagtggtctcctgccccaagacaaggacactaaacttagctccccagaggaaggaactgtgatcaaactagacaggatggtagctcctgggtcccaagagtcattgaaccaactgagacaaagagcctctgagatgcaataacaggaacaaggattctagcctttcccctctgggccataacctggggccccgacaggaagaagctaaattcccaatatacccaagcattgtttgcaggttaaaaataccatctggctaaatcctgctgcgttgggctggggatttgggcctggctgcctatgtgtgaaaatcattgctgaaaattcttcaatgctgagagttataggaagaacccttgtttgagtcctaggtccttgaaagcctggaaatgcttatgtgtgcggataccccaaaattcatacaccacacttactaatggggaacctcggctagactttccttcctctaacatctgagcaccaaggtcagttaatgcatctttattgataagaaaggggaattaatcagatgaaaaagaggccagtgcacggacccagaatttattcaaagggaatcgaggaagcagtccagattagggaaggaaggaagccaggaaagagagagaaaggctggctgcctgcccgcccacctgcccggctccagtgggctgcctctggggagggtaccttgggaatgcggcgggcccggcggctggacagcagctcgctggtggtgctgaggctgtcttcattgaggctggagggtgaggacggcagactcagctgagccagcagcagcatgtcgtcatggctgtgcctcttgggtaatcgtggcagccggtggctcttcctttctgaccagttcccactgcgcagggactggctgttgggtttcagggaaagctggcgtgggggagaggacgtgcgagaggggcttgccacagaggccttggccagtgtctgtctgctgggatggggacacagaggccaagggccggcatccctggatccccgccatcttgccctggaacttccatccctctcttaagactttagctgctaatcagccaggtcagggatagattagatacttgccttccctaaaggaagcttcactactgccagcaaaaaacgaaagcagaggctaaaaacacctgtgctctcatctgagtggaaaaagaagactaagtgggaattttgcgggggtcctcctgagctatgggacaagaattactgggcctgggtgatggaaccagtcttccggacctctgctcccgagccaatcctaaaaggtttctgacagcagaggccataacctactggccagcctgctgggctgggagatcctgcagcctggccctcctaactgctcccatggagaacacaggggctctgggctctgaccaccaaagctgggccaggcaggcctcacactgaattggatcccatacccacaaggccctggctgccctctccccagccctgatctactctctgcctctctccatatgcgctgacctctcatcccagggcaccatccttgtcgcggaccctgtcaggaggcaagtatcccacagacacccaaccactgtctggttctggaattgcctctcctcactcctcagcaaatcctccttcctccacagcccccaatttcctgttctcacccaatcaatctggcaatgcaaactcaggggaagcctgtttgaaaagagtcctaattagagggtaaatctttttttttttttttgagacggagtctcgctgtgtcgcccaggtaggagtgcagtggagcgatcttggcttactgcaacctccgtcttccgagttcaagcaattatcctgcctcagcctcccaagcagctgggactacaggcgtgcgccatcatgcccagctaatgtttgtatttttagtagagatgaggtttcactggccaggctggtcttgaactcctgacctcagatgatctgcccaccttggcctcccaaagtgctaggattacatgcgtgagccaccactcccagctatggggtaaatcttttataaaaacaaacaccttattccaaaggcagaagaaatcatttttatattatcattttatattatctggccaatgctatataatatccaggtccttccatttgcaaagagaattagagttacctggggaggtcagagaagcctctccacctgcctcctgacatcctggacaaggacagaaggagctgaagtccaagagcttcctttggcttttcacctttcctgtcattctgccttctccccatccattccttaaagattcatgcttactctctcccacaggactggctccaggtgtcacagacacctgtctggctctccaaatgtggtttggggacctacacctagccccctaatgccagtactgagatgacttctggcagagttgcagaatgccaagactcccactagggccctgtcttcctgtttcccacagggtgataaataatcagagaggagactgcaagggctcctggctgagttttgcagctcagagcttgtgtaggaagggaaagaagataggacaggatgcccctcagagcaggtgccaattgtccacagaggtttcaacatggtggacatccttgagtgcacagtcctttgctgaggagacctcctttatcagacgagatcgggcacgttcagggtggtatggccgtagaccctttatcaagtactagtgagggtaaaagcctgagtggaagctgggcccaagtcttggaagagcaggcccccactgtggccctcacgctaaccctacaggccgatgtcagggctgagttacctgtgtgggcgggctgttgtacttcctgtcctgaggactccacatcctgtgcaaagagtccaaggagttctcagacagttgctgggattttcgtcctgctcttcggctctttaagtccacatcctcatatggattctccttgggcagatctcctgcagaggaggaagagttagagaagggggagaagggaagaaggaaacacacgaactcacacacacacaaataaacaagcagaattcctgtgaaccaaagagaatggcttctgcctggcccctcagctcatgagtcatgcagctgcccgtctgcagtggggaggctacaaacagatcctggctccaagtccagaagcagacccacccccccaccccccccaaccccccacccccagcccagctcagcctggcctctgctttataaattcagggattgcacaagactggctcagccacccctgcctgtgcccagccagaggacaaagccagcaacaagagtctttccttggctcccttccctctgctgcaaacaccccagagataacacagttcaaggtaggaagggttttcaggtcacatggctgtcccttcacccaactctcaggggatctccctggggacctactttggagggtgggcatggaggaactcacagaaccgtagggagcagggcttcgccaggcccccttctcacctacgatgccgttcaacaagtcttttagggcagggttttgtgttgttcactgaggcaacctcggaacggaacagtgattagcaaggaggaagtgttcagtaatgatctgttcgatgactctcctactgtagtgtctattccctctaccgctgatctcagcaaaaagagaaccatcaacactccccttttggaacaaactctcctgctgtgacacaggggaggtgtgaaaggcttggaaggagtctgggccaaagggtgggggtgaggggagttcttgcttctcaggactagttctaaaatctctggcagcgggcattgtattggcattaccagaaaatctcagaaaagtccaaaacagaatccctgcccttgaagatgttgagtggcactcctttccacaagctgtatctcctgcccccacccctccaacacacacattttctaaaatagagtaacaccatgggccgggtcagtcctagctcaatcctggtggcagaatccgtggggtgaacaggtccctggggaactcagaacacagccctctctgcacccctttccctattttcctgctgcagagcaggactcactccagcacctctgctcagcagcaggattgagcctgggtgccactgagtcccacacttgttctacagatgtctgaatgtgccttacgccccagaggaactcagaccccactcctcaggaagcaggcagaagaaggagctggaggacgaggaacaaaggctgctgagagtgaagctttcctagagaggacacgggagaagagccaatccctatatgcttgcagattcctccatttccaaagtggagctccctccacattgtggcatctacttatgcagaaccacaacgaatttaggaaatgctctaacagagttagggtgtgggtgtgaaggagggatttcagtgacagctaaatagactgcagtgggagcaatataaatctctgtaaacttatgagtcaaagatgggtcactgggatttgggactggattaagtgattcccaactccaagcagagtccccagcaatggaacagaccttttcctgtaacacagtcatgctattaaaatgacttgtctccattccagagccctgactaagcggagctggcccagcagccctgtcgcaagaagccaaatagcaaacccggcaccccctgcatgttttctccagcctaccccactgtggggcacttagggaggtgttggggatggattctctacttcttgatccttccccaacatatgccctgcaggagtgaggaggtgggggaactaagaagggagaatgccaggacacagtcttctgatcccctaaaacaggaccagagcatcactgtccacatcacggcagggagaacatttatgccaagctcaacaaatcgaaactgccttggactgcatgatcagccagggcctttattgtcatccccaacctataggaagccttgtcccaatcccaggggtttctccaagccactgacatttggggttgaataattcttgttgtggtagactgtcctgtccatttttaggatgtttagtggcaaccttggcttctatccaccaggagacattagcatctccttagctataacagccaaaaatgtctccagacactgccagatgctctctgggacggacagagggaaggagggagagagagggagggaggcaggaatggagggagggaagagtgaagttgtcccccaactgagaaccactgctttagatagagctttctaaacttccaatggcttctgagtgtgacatgagtcccaagactagccctcttttttttccatccttccctccttcacctcactccctccttccttccttcttttccctacagtaagagctttgaatattgatacaaaatccaaagctccaagaaaaagacataggatactgaggcccagggaagtaatagatgtacaagcctggtgcacatcactgacaacccaggggaaaacagccagcaacatcaggttctcaagataggtcctgtctctggaaactcaatttcaggaaggcctgctcctccccagccccttgtgccagcctctcttctccagcaatgtttaacatcctgtctaatgtaacaaagccactaatcagttctccagcaaatagacggctggctgcagcccacacgctgcctccccagcctcagcttggtcccttcactgccctaactcatctctcagcttcctggaccattcctgactgccccggaggagctgtctcaaatagattctcccagtcatctctccaggtggacaggggaccaggggatggagatgtacagagacaagtggaccctgagtcctggaccactaaactgaaccagctgagagcaaataagtatcaaaggaatggctcagagttggaggagacggtaggctgggaaatggtgtgcagaacatcctagggaggacagagctaaaggagctaaggctgaatgggagattcagcaggggcatgaatgggagacagggagcctggcagactgcaaatttctacctgcattcctgcccacacagctttcttgggacagtccacatgacccttggagagggacgaagaggtggaccctcttccctgaaggcctggccctcagcaagcccagctggagaagccagaggtctcaacctttcccagcttggatgatgaaataagggacaaaaggcatcaccgagaatttctgctttgcactcttctaaaaggggattatcagagcccaaaggtgtcacacaaatcctcttaaaggaagaatccagcccctctgggccctgctcccactcctccccacaacctcccactcctccctacaacctcccactcctctccacaacctttcactcctccccataactcctttggtcttaaccacacatacagcactcccccagccccaacctaactggaaaaaccagttaggaaaggggtgtgtgtatacgcacaggcactgagaatttctccaaacacagtcctaagcttcctggaccacacccattactagggtcctgggtctgcagcttccctccccaacaacctccgtccggttccaaccagctgtttctcctggttctcagcctttttccctctctcacacaggacagaaagggccaggataagagcccaactccctggcaacagatcagactggggcctctaaggggctggctgttgcccaccctccaagccttgacaccatttctcgacagccccggcaccttccctgggctgcacctcttggctgttttgtttcccactgcaacctccatcccagtgggtgccctctgctccttactgtttcccagcctgggggcaaataagggaagcaaccagagagagtggaggctcaaaagactttgcagtccaggctgactggcccggtccccggcttgcatcccactgaagttcctggaaacgctccctcagcccaggctagctgatgggagtgggaatctgcaggaatgcagctcaggcgccgaggccactccacataattccttaacaagctgcttccttgggtgcatttttaagtgtcaggctcagaatgcaaacataaggcctggtagaatagcagcatcttccaggggcagatgtgagatgggacaggcgggaaatagcagccctggaagcagcaaggcagtaactttctttccgaactccttttctgcaagttagcaaggtaaacctcagtatgtttgggagtaccccaccccagctcctcaggcatcatgcctagtgtaggcaggaggccagcaaaccctccacaacccccattcgagtccactgttcacagacagacatgtttgtcttggggccaactggccctccacctatgacagacaggactccagtccaatcaccaggacccaagatggagatgagcactaggctctctgcctcccaacagctccattcctgcatgcctgcaggagcctgatccagcggggtcagagtcatccttcaccccacagagcacaggctgggccaagaccagagagacggctcccaggaagtccgagccactgatcagtcctaagcaagacgggaaactgccattctgagttcagcaataagacaccccctgaagccttgtggggagctccaaactctcgggcctgtccccagggaaggaaaaggaaacccaccagaatctaacagaaagagagtattttcctctgtatttccctctggcctccctagtcaggtcccagaaattcagattgggctgctatggggacataaaaagggaaaacacgcacagggcactgtcctaactgcagactccggaaaccacccccaccaccccacgaggccaaagcaaaacctaaacatccgatgcagtatattcccaaactggtgcctgggtcgctcccctccctttctcctgcatcctccccctctcttctttccctgttctctaagtgctccaaagatccagaagccaggtgagcagctacctctaccttctgcccacacagcgctgacccctagctgtactcagccacccaagaggcagccaaggtgctcccatattttttttaactcctcatgcaacacccagagtggaagagagtcctccctaatgagtggggaggcagctctgttgccccaccccctccctacctcctgttgcagggtacattctagtttggcagaaactgcaatgtgtcagtttgctgcccaggaccctgggagcacccagtgtggctgctgccgtgggcagagagggctgtgtttttctgatgtcccttgactatgctgggtgctggcaatcctgtggtcctcccattctctattatctgacaaggatttcctgtggggatacgttcttggatcatctgaactgaaataatttgagaaagggacggcttcaaccatttctctctgtccagagttccaccatccagggctctgttcaggattttttggggcaatgtttggggggcagaattttggaagaactgttctgggcaacacagctgttccccaggccttcttaggtcaggtttgagagaagggaaagaggagggcaagtgtgtctaggcctctgcctactcactcattcgggaggactttcttccactctgggatgttagtcttgcataaggaggtgagaaatacaggaacagcactggctgcctcttgggtggctgagtagaactggggtatgggctgcagttggggcatcttccttaactgcccacctggcttctggatcttttgttctgatgcccctagctcttgacctctgctctgggtggcctataggtacaaagctgtcttttccccagtggtaagggaaagggcctccctccccaaactcttttgcggttctagggacctcattcccacagtcttcctgctgtgacccagttttgcatggctacatactatacgctctgttcctgggaaagcagtgtccctgcacatcccagcatggctgctgtctccccagaaacaatggcccagcaagtggtaaggaaacggctgtgaaaccaatggctcagatcaaatgagggaacagatggccctctcttcataagattccaggcttctggctcacgcctataatcccagaactttgggagaccgaggcaggcggatcatgaagccaggagatcgagaccatcctggctaacacggtgaaaccctgtctctactaaaaatacaaaaaaattagccaggtgtggtggcgggcacctgtagtcccagctgctgggaaggctgaggcagaagaatggcatgaacccgggatgcggagcttgcagtgagccgagatcgcaccactgcactccagcctgggtgacagagcgagactccgtctcaaaaaaaaaaaaaagattccaggcttctgataatctggaggtttccctctaccctgggccacttctctctctcatgtattaactaacaccacattcttcagattcaaggcccaagacagaggcaagacagggacatagagagggagccagcaagcaggcagcacacagcctctctcctcctcactgacctacactgacacgcacacttcacttgggcagaatcaaagccccttactgatgaggatgctaatagaattgaaatgaacgccaaaaaacaaaacaaatgcaacccaggctagagcattctatctttcatctgatctgtgaacacaagtttgccaataccatgtcttcccacctgttggaagacaaatcccaatggagtctcgcatttctgcccttcttctgaacaagaggaactgacagttccagactgtattttaaagggtatttatacagcaaacagccttggaagacagagatagtgtctcccttcagggcagaggcagatttgtttcctgaccagagtgataaagataatgtctcctccaaggacaaaggttaggcaggtttgccagcagtctctgaaaagactggggtttcctacgcttgggctccccagctgggacatggacctgcagtgtgtgcagcttccacctgggccttctccacaccgccccatgggacttaggcacaaggggaaacccgtgtgaacacgaagctcatgctgcctactgtgccataagtaataaagtcctttgcgacccaggggtctcgtgtcttctgccagcaccatgaaactggggcaatgaaatgtgttagcttgtacaatagactgaatgtttctgtcccccaaaattcctatgtggaaacacaggtgaggcctctgggaggtgattaggtcatgagtgcagggccttcaccaattagggcccttttaaaagagaccccagagaactccctccgccccttccaccatgtaagaacacagaaagaagatggccatctctgaccaggtagcaggcctgcaccagacactcaatcttatttaattctaacaataaccttatgaaatattacttttttttttttttttgagacggagtttcactcatgttgcccaggcaggagtgcaatggcacgatctcagctcactgcaacctctgcctcccgggttcaagcaattctcctgcctcagcctccctagtagctgggattacaggtgcctgccaccatgctcagctaattttttgtatttttagtagagatggaggctggtctcgaactcctgaccttaggtgatccaccagcctcggcctcccaaagtgctggaattacaggcacgagccaccatgcccggctcgaaatattattactattattgttgttgttaatatagtcacatcatcatgttataagagaaaaacagagtcttcacaaaagttaagtgatttgccttaagggcacacagctaaggaagagggcctgttggacttcaaagccttccaaaaataaaggaaaggaatgatgttgttttctccttctcgtgtccccaaaggtcctttggatttcagttcattcaagagccaggcttttaatcacaaagccactctgtctaagctaaggtgcttcccctgatgtcccattccaggaggagttccagaaggtgggaccatgcctgcccacagtgaaggaggtcaatctaggtgtctcctcctgttcctgttcttctgcagccccctgagatgacccaggtgccacctctgccattgcttacccacaatatcttcataggcattttcttctaaagtgcttttggatccaaacttgggttggttctcagtaccattctcagtgggagaagaggggtacagggactggagactggatgcatcctcaaactcaaaggattttctgtggataacaagagcaagagtcattcctgctgaatcagatctctgctgccttgctggggaatgtccatggcaacagcaaagaccataggccctccttacaaaggcagcttctgaaagagcatcaaggtgggtccaaacttaccatccaaatgaagagacagatggtctgaaaggccccagcctgggtgcctgcaatgtgccttatcctgaataataccgctattagataacaactaccccagcttaaaagcatgctgttccaggtgctgcgtcaaatccacctttacatgtgttatctcattaatcttcacaacagtgccaccagtattgggacatcttgtgaaagaggagatggaagtgacagaggcatgattctcccaggcgacgtctcactccagggcctgagctcttaactataattttggccttgagccctagagaatatcctccttgagaagtgtctgtgattccactggaattgagtgcctggtctgcctctggagtctcacatcctcatctgcatcctagctggggactcctgccactgcactaagcaggtaggaaggctcaacactgggagggtcccactcagggctgtcagggggttggaaaagcagttgttgctgggtggtttgttgaagcaggaagggctgagcccttaaaacaaataagaccactgccaaggtggagctgggaggacaatttgcagccagaagctgcttccaagaccaggcttcccttcagctagcttgctcctttccatcctttggacaaccttcctctctactgtataatttcaagaccacagcttgttgtctcctaagacaccctgagcctacagcactctctgcccctctccttcatgagagaggtacgtccctcatctgagaccccaactgtaccctctccctctccaaggcaagtccccgcaggctcctggggagggaaagaaggaaaggcactgactggatccctcctcccacccatgaacacctccctcttctttggggcaccatcagacctttcagccaataaagccctttttctcttgtttactaacagcttctcctgagagtcctagggtgtaggtaaagggctaaaagtgtcctgaaggctacagcttgttcttagcttgcctgcccctgccccgccccaagcactcaacacaaccgaacactctttatattgacatctcctccgtgtgcctctgtgacacattccctcctggctttcaactaactctctggccactacttttcagactcttgtgaggggttctccttttccatttgccttttaagtgtccgggtctctcagagttctgtcttaaaaactctttctcactctgcactttctagggaccaaatatccatgggccattgccatatctaccatctctatcttgatgactcccagatttctgtctttggcccagagattctcaactagttaaacatccaatggctgagcacagtggttcgcaaatgttggcccaggaccagagttagtgtgagagcaagttttctttggcatatacagtagactcagcatcgtatgcaggtagccctcaagtcagtaaataagacacaaatcatgttcagtcaaattatccttgaaaatcccccaggaaggtgtcacactgaggaccaacatgctgtctctcattaaaactaatagtttctccccaggtttttttttttttttttggctgaatgccagaagaaacatttggcttggcttgcattttacacaaacacacacacacacacacacacacacacacacacacacacacacgcaaatttttttgagagacaaggtcttgtgctgttgcccaggctagagtgcagtggtgtgatcatactcgctgtaccctcaacctcctgggctcaagctatcctccctcctcagcctcccaagtagctgagactgcaggcacatgccaacactccagctaattttttaaattttttgtagagatgaggtctcattatgttgcccaggctgtctcgaactcctggtcttaaatgatcctcccactttagcctcccaaagtgctggaattacaggtgtaagccacctcacctggactgcattttttttaaaataaaaaagtatattaaatataagaatcacacttggtataacagacacaaacttaccatctctactcctcatggaacatgttcactgtgtgaaatggcatacagaacagactgcacttctggaactgtttctctttttccaagagcacagatttaagtttgctaagttaattcttacatgaagggactcctccatatatggtatacgtgtgtatatattatatataaatgcagtgtggggtggaatatgtgtaaaaccttcaggctgatgaactctcccccccactccctttggtcacctagccaactgcttttggctcttctaaatttagctcagcaactccctctatgaggagcctcccttctctcccccatctaactcagatgccccttctctgggtctctgcggcctcctgcactgccatgagtcatggcacgtatgacattatctatgatttatctgtgcaccagaccacgaagtccttgaatggaagaaccatgtcctatttgcctctgcatcctcttgaccagcacaatcttggtgcacagcaggctctagaagaatgtttatagaaatggatgaacaaggacaaagcaaacactcttggcaggccgtttaagaattaaagagccagtgagcattctggggtggactcaaacacgggattacccttagccacgggctgttccggctcgggggtctgaatctttgaaatttcttcctttctgcacatggcaggaaagtttatatatgagatgggatatgttagatgaagcctgaagtgtggggacaaactaaagaatccccagaagtgaaacaaacctgaatacccatcagtcgtggggttagatgagaatggcagtaaggtgtaggaggataagtattcccaaggaagctcactcccagcctaccctgattcagagaacaagacgcctgccagctttcaccaattccaatagctccagctccaagttaccggggagacagcccttggtaatctggggttagaaatcctgagactgaccaggaaaccaacgtgagcctcggaacaggctcattcctgttttactccttttttcatcaatcttcccaataatcccctcttgatataggcccagggttcgtatatggccaggaggccttcaggagagaaggaattgtgttaaatttgccgacactaccatgttaatgataaaatgcagtattcagataatgcttcattcaaagaaattaatttctaatgctggtacttcaggtggtagggaggctaagatcctactactccgcaaaggactgcctgctttacctactcccaacagaagactgaggaagctacaacaggggcaggacacagcccagctctaccccaaaggccaaacccagccaataccttcagtgaccagcactcaggtcccaagtatcctgtaagcattcccactcatgtccaagtatcttgtaagagcagaacaatctcatttttcactaccacaactaccacctaacaattattcagcacttcagagcttacgaagcactaatgactgcgacccatcctacaatctgtgtttgcactgtccatttaaaagaaagccacggtattcagctacaacacaccggaggggcatgcattacctgctctgggacttgcggtgaccacgcatgtccttcttgggtctccgggtgactggcggggctggggtggagggcaagggaggtggagcagcaggtgtgggtgaaggaggtagaccattactgggcttactcttggggttcttgtcagcctcgtattcaaaggtgcgcttgggtttggggacagggttcacagcgggatcgagggaactcttcgatggcagccgctgggagctagggctatttccaggggtcccgggcttagtggaaccactgccttccctctctgggggtgggcccgcctcccccgcaacaccagccactccgactgcccggctgccagcgctcacactcgcgccccctgccggctcctccaaggagcccaaggttccagtcttccttttcccccggtccacgctgtagcagctgctggggagctgggggagcccccggcccggctgctccttcaggacctgttcaattttctggatccggctcagcactgctgagctctccttcctgctgccatgccccctgaggaaggcgctgggctcactccggcccagccgtttctccagccggtagaaagagtcccggacagggagcgcctctccctcctcctcagtctctgggtaggaacactcggagaaggtcctgctcatcctccggaggcccttgaaatcaaaggtcttttcagagctgcagggggacggcaccacgctgggacagcccaggctggggcagccctcactggccgcccactcgctcccagagccctcccgcttctctccacacatgctcatcctgggcgacgcctctcggcgaccttcccatgctgatatcttctcccggatgcccaggctgtgggcgcgggtaccggtacgggtcagcaagacgccccgggggccagctgctggccccgggaatggcgtgctctgggcaagggggaggcaggcagcgacccctgctacatcctgggctgcgccttggacactttccttttgggcgtctctcttgcacgccgaagggcttctgtccaaataaccgaagctggcggtcttgaagggacaggtgggtggggaagtatctggggagggatcttgaggattctggggtgaaggagctggggggtgccggtccttgaggagcacccgggagctggagtggctggggtacctgcaggctgaggtttcactatcactgagcgggtagatgggactccttggtggggagagaactggaggtggagagactgactgagacctgggggcaaaacaaaacaaaggaaaagaaaagaaaatggcagtgagtggctgaccaaccagtggcatcctgttttattcttacagaactcagcatctttttcctggaggactctcaaagagtattctattcaagtaatataccttgaaggctgtcttcaaggagagcaatagctccttaatcacagcaggccaaactcaacaggcctctctgcccaaaccatccccaggcaccctgagtaatgtctgaaacagacacctgttctgtgccaagcgagagcatcccaagagtctaacatctgccagtaagaggacagaaagcccagtggtgtgctgccacatgcttaacaaccagttctcagaaggtgtggtggctcatgcctgtaatcccagcacttagagaggcagaggcaagaggatcgcttgagcccagcagttcaagaccagcctgggcaacatagtgagactctgtgtatggtaaaaagagggaaaaagggaccaaaaaccccaaaaccaaacaagtctgaacaaccggctctctaggggcaacagcagattggtagcacttgccaactttggtagtataaatattccaactatggctgagctaccaatgtgacgtcactggctgtggagttgagaagagatgccactaatcagctcttgtgaactggtgcaaggtggttcttgaacactactccctgaagtggcccccaaatacactcagaccctttgatctttccctttaacaagcctctgtctcccctgggacttctgctactagacataacatctcacttcttcatgttgggttctgaccagaattagaatccctgagggcctcagacaggtcagaagcgcccctcaggaaagagtcttttccactctatcattgaggaagccaatggggtggggaggccaactccttaggcagctccaccctccagcagtggcatcacatccaataattggcatctaccatgtcccagctccaaatccatatgcagatcttggcaactacaaggaacacttctgaataaatgtttttacatatgttaactcatttaatcttcctgaaaagtctatgaggttatcatgtttattatcttcattttacaaataaaaaacactaaggcacagaaaggtttaatatctcatccgaggtcactcagctggtaagtgaaaccaggacgtgaacttccactacactgggctgactctctgaagaggaagcagtgcctctgccactttctgaactgccagggccctgaggcaactcaagagaaatccccacagcactcagcacacccctgccacagcacttgtaagtatcaagggacttcttggtcttccctactagaccatggtttcttctaggcccagggacaaacaaatagtgtctggaaggtgctcggtgaatgatgaagagcaaaaggaagggaaaggtgagcttattgaagagcaccatgagcatacttcctcttgggcacacttttctacttgtctactagagtaaccactgtcaactttcagaattctttccaaacagtttcagttcaaaaacagcaggatttgccaacactgcacagcacaaggcctacctgaccctaaggccgtggccctcagctctgggctgcccagcctctcaggctccggaatgccatgctatccacaggaaggcagccagctgcccctgagccaggctgctgtcactgctcgctcacacacagaaaactggagtttgggtgagtcagggattggctgacaattccctgctgggtcacaggcctctggctgcccccaatcaacaggaaacctcaacatgcttaagttgtttttcaaagggcaagtcaaacaagagccatcccatgtgtatatgggcacagatgagagaaattcagtgccaagccaagccaatgaccaaagaggctctgctcagtgaggaggtgtgaacagagtaagcctccgcactccctggggtagggagcggcagggcaagtcgccaggcttgaggcggggggagatcccaacttcctcacagttcatggaggccttaggtctctcttattttatagaaccataaatacaaaaggtcatcagtctagcccctaagtgaatgagtgtctgtgctacacaaaggactctgttttagttctcaactgaagatgcatttgacagaggacaatttcatttgtttattcattcgacaaatacttagtgagcacctactctgtgctaggcctgttctaggtgctagatacaagaataaacaacacagacataaattcatgtcctcgtgaagcttatattctactgggagatggcaggcacctaatgagactcacaatctcttgggaagcctttttaaactatacatgcctcacctgctcaggcactttgatatgtggttccctagggctgtgtctccccagcggcccaggagagaattcaccagtccatggaaccactgttacttatggtagtgtggggcatggctccttgggataggaaaatgattcaggtcctctggtccatctgatcccagcatgctttcagaaagagtgattctataacttcccttagtggctccagcacgaataaatcctcacaggttaagaactttctctcaatgcctaccctgcttcaactgaggtttcatttctcccctctcatgcagcataaaatagagagtagactggccctttcctctgaaggtcctgtctttggtgtcactgctgacctgggacccacggcttcacgtgctacccttgccccagcctccccacacaggccaggcccagtgcactgtaccacagaggaacctgcctgtgctgacctgaagccccatatcacagagaaggcaccagtcactcattccaaggtctggtaaacaataaagataaggccctgccctcctggggtgacattctcacttgagggtagaattctctgttatctgtctgcatgtttctgattctacctcttattagcaatggactcacactctgaacatccagtttcatttcttcaaaactgttccattttacatcgcagggttgtcatattgagccaatgagaccatggatgcaaaatgctcattatcattagtactgttttttttttttatcaggttatggctagccagtcagtctcaagagagggtaagaacatcacagccttggggttcaagtttcagtgtagccacttataagcttcatgactttgagcaagtaatcttctctccctaagcctcagtttccttaactctaaaatgggtgttggaagatcacgtatctcggccaggtgcagtggctcacgcctgtaatcccggcactttgggaggctgagacagatggatgacctgaggtcaggagttcaagaccagcctggccaacatggcgaaacccagtctctactaaaaataacaaaaattagctgggcgtggtggcaggcaactgtaattgcagtgactcgggaggctgaggcaggagaatcacttgaacccaggaggcggaggttgcagtgagccgagatcacgccattgcactccggcctgggcagcaagagtgaaaacaagagtctcaaaaaaaaaaaaaaaaaaaagaaagatcacatatctcagagaatccctgtgagaaatagtacctgtcgcgcattgagcttggggcctaacacacagtgttccatcttagcttgataattactcatattcacaaggggctggctcttcagagtaatcacctgggaaatttggtcagtttgccactgtcaatggatcctgaacgctgtcggggcaggggggcgggagggcggggagtaaatcaaatatgaccatgaattctcagcagctcaggctatggaaaggtggagtctattgctccgtcactcgaatcttggttgatctcggtgatttgctttgagtataatacaatgtggcagtggaaattgaaattgttcaaattctaaacttgaggcctcaagaggccttgtagtttctccctttacccacctggaatgctgccctgacaccgtcacataaggaagccagtctagtcttttagaggacgagaggtcccatggaatgtgaccgaggcacctctgtcaatagccagcctacaactgcctgactcatgaatgaggccaccttggacccagacccagccggacacagctacatgagtgcgcccaggggaaaccagcagagaaccaccagaaaacccacagaaatgtgagaaacaatcaactgtgttaagccactaagttttggggtgatttgctccacggcagcagtaaaaagatgcaggtgggaaaggccacgcctgcgtatcattggcccatcccatcccaatgcagagccactgccctggccttccttccccacttccccacaggccagcttagcttccatgatgtctggattggatctctctctcactactacaggctctgatgctcttatgggggcaccccctggaagtggagctagttcagccaccctaagaatcagcttccaccagtctttgctcccaggctgaaggagggtcaggagagtctcacctagagagggaacactagggaggcttcaggagggacacaatgggagccaggtgtcaggatgtctagatcctcgtgacaaagagtttgcacagcaggtgtcatcccctggcatggatgggagagagtgctcattcctgggcttcagttcctctctgtctagttgtttcctagttcctcaaactgagactcggagggaaagtaagatcattctcccctgttggacaagaggagaccacggccaagagaagggcagggcctgccttcggatgccaccatgggagcaaagccactgacagtctctagcttcacttcttcatggttcctaggccagctccttgctagccttctctgcatctgaacgaaggaagccacctatcaccaagaccacagtgtgcaaccccaccaggccggagatacattttggctctccatccattcaaccagatatattgagcaccaagtctattccaggcactattttaggctgaggtgggaggactgctagagcctgggaggtcaaggctgcagcaagccacaatcataccactgcactccagcctgggcaacagagtgagaccagagtgagaccttgtctcaaaagaaaaaaaaaaggatcagcagagactaaaaacagacaaagtctctttttctataggttacattctggtagacacacatcaagttgccttatttgtttagagtgagcaggtaacatatcaactctgtgagacggtttgggggccaataaagaagaataaagaaggggaaagggatcagagatgagcagtagagatgagttgctgttttacatagggaggtcagggaagcccctcttgccaggggacacatgaacacaacccaaaggaagtgagcaatgtgtctatccaggggaggaatgttccagacagaaagtgcagtagggcaaagataaccgcatgcctactgtattccaggggcaacaaggaggccagtgtggccagagtggagggaaacaatgaagtgtgggctggagatgagcctgagagacaccagaagccacattatggaaggccccatgggccactgataagacttgggcttacactctcaagagaaggaagctcttgagtggatgtgagcaggacagtgacagaatctgacttcacatcagaggatgacaggcaggggtacaaaggtggcaacaaggagactatttagaatgccactgcagcaatccagacaaacgattattatgatgactcggatcagaagggtactggtagagacggatctactttgagggctgggccaatgcaatttgctgatgggttagatgagcagtgagacacaaacgggaagtctaggacagcatcaggatatttggcctgagcactggtagaatagagtctgggttataaatttcaatatgggagtcattagtggtatatagaaatatttaaaaccatgtggccaaataagatcctctagagcgtaagtgtagctagagaagtccaagtgctgggacgttccagtgtgttggggtctggacaaggaagaagaactagccaaggagaccgattgagaagaggatttagtgagaaaagaagaaaacatgaagagcaatgtcctgagacacttaagaaacagggagtgatcaactgagtcaaacctgccaacaactaagtaagagaaggactgagaaatgatttgaaacatggaggtcactgtgacctgacgaagagaggttttggtagagaggtaggaagggaagcacgactggaaaaattcaagaaaagggaggagaagcagtggagacagagtacagacaactcttttagagttttcctaaaaaaggaacaaagaaatgggatggtagctggagaagaatatggcataatggaagcatctttctctctctttttctttctttctctttctctctctctccttccttcctccctccctcctttcttttctttctttcattctttcttctcttcctctccttcctcttcttcctctccttcctctctctcacagggtcttgctctgtcgctcaggctggagtacatagctcactgtaacccaaaaatcctgggctcaagccatcttcccaccttagcctcatgaatagctgggactacaggttcatgccaccaggtccagctaatttttttttttttttcacagatgggggtctcactatgttgcccagataggtcttgaagtcctggcctccagtgatcctcctgccttggcctcccaaagtgctgggattgcaggcatgaaccaccatgccaaccttgtgactgtaattggaatgatccagtagagagggaaaggttgtcagtgcagatacagagggcacaaatgcaggaataacacgcttgagtaggcaacgaagaggtggggacccaacgcccgtctaaaagggctggccttatactagcacccactttcccatgtgcctgcactggacgtctgctctcacagtctcgtccctatgctgctttacgcttcagttgatcactccctgtttcttgagcgtctcaggacatcactcttcatggttttcttcttttctcactaaatgctcttctcagtcggtttccttggctagttcttcttcctcgtccagacctcaaaacactggaacgtcccagcgcttggacttctctagctacacttaacgctctagagaaactcattccagaggggggagaaaaggtcagagtttgttcccctcctgcttcaagcatctggatccagccctctccccaaacacattgatctacttgatgactatgtcctatcaattctacttcctaacatctctcagatgtgtccccctcctccccatccctgctgctactgctacttctttggtctcttaactcctctttctgccttcagtgttaaagcagttttgatccatcctctcatcttctgacattttcccaaaatgaaaaactgatcatgcttgaaactcctcatatctacagaataaaatgcaaattcactggcattgttgatgaggaccccatgagctggtccctgcctactttccccttcattatcccacattgttttccctccttatcaatcctgtatcccacccttaggcacatccaactcttagctctttcacaccctaccccctttcaggtagagatggcctatgcagaggcctccactggggagacatctgtgatggcatgtataacactgcattgcaccagactgtttcctctcccttactagactatgagtgagcccacctgaaggtggtaacagtatcttgttaatcttgatagccccctgcaaagtgcctagaacttaaaaggaattattatttgtgttgaatgactaaatgaatgaaaatgtaaatagttaaaaacctaggcctcttgtatgcctgctcacaacattgtctgcagacttcctcgcctttctctttgtggtgtatgagctgaagaacaacagagaaaggtacacgaagcactcggtgcagcccagtatcgccgtcagcccccgaagccctctcccactaggcacgaaagctacacactggctgggtcctggtcccatcactttctgggtgtgctcatgggcaagccctctaagttctctgtgcctcaggttctttaaacacagacaacacttactctgagtgtcctcacacaccagctgtgtggctaagatgacgcaaatctctaacagtgtttgaacactataaatcattccataaaggtaaaataaataatttttaaaagtaaatacaaagcagccatcagacacccaagactgctcttatcatctctctgttattctacaatcccagagtatgcccctgggaggcagacactgtagaactgggcacttgtgccgtggccttgtcagcaggcagccagttctgctgctcaacacaggcatggatgccaacactgcagcatgcaactggccaaaaccaacattttaaggagagatgaagtaagatgaacagataaaagaaagcaggggagaatgcaaaggacatttaaaagaaacagagcaccataaatgcacacacacacacaaatatgtaagacacataattaggatggaaagaatatgagctaaggtatggaaagagaaataaatttaaagaaaaagtattgtgggccagacatggtggctcatgcctctaattccaacaatttgagaggccaaggtgggaagatcacttgagcccaggagttggagaccagcctaggcaacatggtaaaactctatctctacaaaaaaaaaatttaaaaattagctgggtgtgatggcatgcccccgtggtcccagctactcaagaggctgaggcaggaggatccttgagcccaggaggtcaaggctacagtgagccatggttacaccatggcactctagcctgggcaacaaagtgagatcctgtctcaaaaattaaaaaaaaaaaaaaaagaaacaagaaaagaaaaagcatcatgtgtatgtgtgcgcatgcacatagacagaaagtgagagttaaagtgcataataaatattccctctggcactgtctcacaggaacacgccccaatccctgggctagtgacacaggcccctcttcagtaacacaggcccctcttcagtaacacaagaagcatttgtgctaaggaatgcctcatatattgtcaggtgccccgaggaacttttctggagggaaggctgtctttagtccttgatgaacttggcatgctccaagttgctctgctttttctggttatagggctactacaagtgttagtaacaagaagggactaagctggagctagttgggaaaaagtcctagtagtcctggaaacagcctgagaggtaccatgagtgccatgagtgttatgagtgccatgaagtgagcctgtctgcaggtgaaggttatacagggctcagtgtccaaaatgcttccatccctactaagcaatgtctagcctgcttcaaatgaaactgcctggaaggtggccggccattcagcattctcgggcttctctactaagggccctgttggcttggtggcatcaccatcctcctgccactcagtgactgccccaattctggggatggcattctcactgcgctaccctaaagccatactcttgagcgtggaggagaaaaaggaggaagagtgcctcagtcagcaagtccaagagtttgttccccagcctagagcagaaacttgcccagtaacaagacatagacatcccattccagaaaagtcctgagaaaaagccaaaggacagggtgatactcacaacttggctttcttgctcccaaagcaagcatctcaaacagttgtgagccctcaacagggtccagggcagcctcagcccccaactggggctatatctaggccaccatctatagagattttccaggtccctacagcttgtcagagttacgtgaaaggtagtgagagtcacagcataaattgagttgccttttcaattccagaaagcacatctaagaatctatggaagccacacctgtctgcccccaagctgatttctaaggaagcaccaagtggaccgctgagctcttctccgggagggaatgatgaactctctaaggagcagtggcaagtgaacacagagagaatactgacactgcagaagccccctctgaggttactgatccctgacaggaacatccccagtgccctagtccagtaaagactgggctgctgtataaagcagagccaggcattagacaaagccaagagggaggcaaatccgattccaggaaaccatgccaatggcacttgtggtagttttaaaacgtggtccccaaattctttgacatgcctccagtcaaaataacccctcctcttaaatctgggctctgttactgcttgattgatagcatacaatacaagtgatgtggtgctacttttcaggcccaggcctaaaaaaatcagcagctcctaattcctgtctaccatgctaggagcaagcccaggccacgtggaaagggtacatgtaggtgttctggctgccagtcccaggtaaagccccagcaacagctagaatcccccagacgtggggttaagacatctccaggtgataccagcccctagctactgagccccaccacaagccttgaagtcttttacttttttctttttgagagacagtgtctcactctgttgccaggctgcagtgcagtggcaagatctcagctcactgaagcctggaattcttgggctcaagcgagcctcccgcctcagcctcgtgagtagctgggagcacaggtgcattccagcacactgggctaattttattattattactagtttttgtagagacagggtcttgctatgttgcccagcctggtcttgaactcctgggctcaagtgatccttatgcctcagcctcccaaagtgctgggattacaagcgtgagccactgcgcccagccagccttgaagtctttttagccaaggcagacatcatggagcaggggcaagccatccctgcagtgctctgtctgaattcctaatccatggagtctgggagcataagaacatgttgttttatgccattaaattttttttttgaggtgggtggttggcagtagatgtctggaatatattttggcgcctgcaagagaggtgctactgaaacaaaatcttaaaacagtgacttttgggctgtcagtaggggcataaaggagagtaaggaaatgctattagaagctagaaaagaaggaacccttatagtgttgaaaagcttgtcagctgtggtaacatagataataggaaatacagctaataaatctgatgaactacctaaggagatttgcaggcaaagtgctgaaggtgccatctgacttgctctagctgcctacagtaaaaaagagaaaagaggtaaactaagaaggagctgtttcgttgttaaaatttaaaggaatcacaaatgagaaagggcttgctggttttcacttccagtacctctaggcaggaaaacattctcaaattaagaaatggcttccagattgtggtggctgggcacggtggctcacgcctgtaatcccagcactttgggaggctgagatgggcggatcacctgaggtcaggagtttgagaccagcctgaccaacatggagaaaccctgtctctactaaaaatacaaaattagccaggcatggtggtgcatggctgtaatcccagctacttgggaggctgaggcaggagaatcacttgaacccgggaggcggaggttgcagtgagatgagatcgcgccattgcgctccagcctgggcaacaagagcgaaactccatctcagaaaaagaaaagaagagaaatggcttccagattgtggtgatggttttattgagtatgtgtgtgtgtgtgagtgtgtgtgtgaaaactcaaactgtatactttaaattatataatttattgtactttaattgtccctcaataaatctgtttaaaaaaaatctaaagtgagactgaaaaaccctttgttaagcccccaaaaactggccaggtacggtggctcatgcctataattccagcactttgggaggctgaggcgggtggatcacctgaggtcaggagtttgagaccagcctggtcaacatggcaaaaccccgtctctactaaaaatgcaaaaattagccagatgtagtggcttatgcctgtaatcccagctacttgggaggctgaggcaggagaatcacttgaacctggttggcagaggctgcagtgagccgagatcacaccactgcactccagcctgggtgacagagtgagaccctgtctcaaaaaaaaaaattttttttttaaattacttaaagtgttgcctcatagaacagacagacagacaaaaggcctcctaagaatcttatgagtgggtcctgtaaatcctctctgaagacagtaaggctcctaagaatcttaaaaacctttgtcccatagcaatctcccaagaaatccaaatcgaagtggagaggggcttatctcttcctttttttttttttctttgaaacaaagtctggcccccaggctggagtgtagtggctccatcatggctcactgcagccttgacctcccaggctcaagcgatcctcccacctcagcctccagaggagctgggactacaggtatgcactaccatgcctgattaattttttttttgtagagatgggggcggggtctcactatgtcgcccaggctggtatcgaactcctgagtgcaagcaatcctcccacctcagcctcccaaagtgcttgcattacaggtatgagctactgcacctggccaaggggcttatcttgaagtgatttgtatgtgtgccttttgctattataatggattataaaatgattcataagaaacccatgaagttttttttttttttttgggggacagagttttgctcttgttgcccaggctggagtgcaatggcgtgatctcggctcaccacaacctccgcctcctgggttcaagggattctcctgcctcaggctcccaagtagctgggattacaggtgtgcaccaccatgcccggctaatttttgtatttttagtagagatggggtttctccatgttggtcaggctggtctcgaactcctgatctcaggtgatccacccgcctcggcctcccaaagtgctgggattacaggcatcagccaccgcacccagccaacccatgaagtttttaaaggaaatgtatcagcttggagtaaaaagagcagagatagtacaaaatgaagaaaagactttgggcccttaacatattatgggcatgaagcagatggagaaactactcacctgcaataatgagctacttctatggaaaagaaaagatgagtcagagagcagaaccaaaagcccagagggtgcagctagagacaaggtaaatgagtcaacacctagtcaaagaattagcaacagctgtcccactgaatataagaaatacatcaaaccagtgactgctgggtacctcttattttcccctttttgaaaagaagcctattcagtggttaccctaagcctgtcccaccagtgtcttttgggtagcagatatacattctctttaagttacaggtcttcacagcaagagaaacagtacttaaggagctgcacacaaggaatgaacctgcgccccaaaagtctcatctacatccagacctgatttttttttttttttaagacagggtttcagtctatgcccaagctgaagtgcagtacaatcttggctcactgctacctccatctcccaggctcaagaatcctcctgccttagcttctagaggagctggggctacaggcatgcaccaccacacccagccaacttttttatttttggtagagagggggtttcactatgttgttgcccaggctggtcttgaattcccaggctcaagtgatcctcccaccccaatctccagagtagctgggactacaggtgtgcaccaccacatccagctaatttttgtactttttgtagagatgggttttttccatgttgcccaggctggtctcaaactcctgggctcaagcgatctgcctgcctcagcctccccaagtgctggcattagaggcatgagccaccgcacccggccctatctgtacctgattttggtgacaagattccattgtaatagacttcaagctgatgccatgaataagagaagacctgagattttaggggagagagtgagtgtattttgcatctgggaaagatgtgaattgttgcaatcagagggcagactgtattttccaaagacaggaaccacaacctatcccattccacataccttcttataaagagatgttgagattcctctcagcaggtggtggaaattatcttcctttctcttgaacttgggcagccctttgttactgtcttaatcaatacagcacaatagaagacaaactatctgacttttgaggctagctcattaaaatgccacgcatttttgccttgttctcttgggattcttactcttggaacccagatatcatgctatgaaggcatgctgccaagtgtggaggtgacgtgcaggtgttccctagctttagtcccaactgaccgccagcatcaactgtcatacatgtaagccttcagatgatttcagcccctagccattgagtcacccataactttcaagctacccccagctgatgctgcaaggaacagacacaagctttccttgctgagccctacccaaattgcaattggtgggcaaaataaatattattctaagccactaagtttggggtcatttgttatgtagcaataaataaccagaccagtactgacagcatcatggttggattctaggaagcatctcgagtaacaggggctgaggccacagggcctcctaaggggggcctgccacggccaggacaggccctgcagcactatcttttacccacagctactcaggagatttttcttctctttaggctcttagcttcccccgatctaaggcacagggtccaaatctgtgcctacattggccatggaacctcaagacatctctggatttcactgtatcacaaactgaggccaccctctgcataaaaacctgcaaatatgagttgaaattagggctccactgccaattagctgtgtgggcttacaggttcctcatttgtaatgtaagttactgagccagatatatctcaagatcccttccaactctaacatcccaacagagaatgtatcgggcctccaaagagttccagctgagtaggggaaataagacccacacaaatatccactttatgagatactatatgataagtgccatttggccgttttgaaccaaagattctgagtgaatgcagaggagggagggatttgtcttagttgggtggtcaagaaaaacactgggagagaagtgaataattgtatccagattggcagaaatgtaaggtttgcattagagaacagtgaactattagggcagaaagaaagaccagggccagatcatgaaaagccctgcaaaccaggctaagtttgactttatcatggatagcagtactttgggggcaggaagatcccaggagtgctcataggaagggaatgtgttgggataataaaataacagaaggatgaagagaggcaggcttgagtacctcttcctactagttttgtatccttaaggagtacctcctcttttctgtgcctcagtttcccaatctgtaaatcaaatgggttggactgaatgagctacaaagccccctttcagctctacctttctaagaaactacagactagatgaaaacagagtccaaagctaagatgacccattaggaaggtactataaggactcaagtagtacaacagcctatgctctaagaggctgctctcccatctatctagttgactaatcaacaaatagctaatggcttctacgtgccaggcattgttccaggctctaggcacacagaaagacatcaaagtccttgccctcaagaattatatattctcacacactcagattttcagcacccaccacaagcaaaagttctcaaactcaaggctgatacagtctgttatttccaagttgcaatgacccaggtgctggagtttcatagtgaagaagctgtggaggaaatcagcaggtcttcagagaagagcccctgctgcctgccaggtcttactgcaaaagtgaaatctcctgagagcagtaagtggcaaagttcaccctatctacacagctgaattagctctaaacataatacttccttttttgcaagttaccaacctgcttccagtcccaccccaggtcatcaacaccaacacagtaaaggctgacctctagaattcagaagaggtttgagaatcccaccccagacccccagagtgggatgcagccatatcttgtgagctgaaatgggaacagcctgtggggagagtgtatctggcaggtaaggatgaacagtatgctcattcggcctcatcaacaaaagcgaagacaaggaaacctgctccaggagaccaagatacagcaaagaacaaaactgaggcagtcacatgaaaggcttagattttcccctcctacacattcctgccaaatcaagactaagctgcaaaggaaaaggaagggaataaattagcaacacacctgtgaaaacctagggactggaatccagggtctttaacccagacaggcttggtggtagcaccaggtgaagtcttacacaaattaagggtacagtccttcaaatacacaccttgacagttacacagggtcccatctgcccacccccgccagttttccttgaccagacctccctcttccaccaaagctggatacaaatgcgtcttagaaccactgggttcctctgccttcatgtggatgatgtggaagtccccgacgtagccaaagtgtcaaaggcccagctttccaaggccccaacaccctcccctccccaactaaagctctggtcacaccgaggagtctcctccttggattcatgtgctggcaatgataaaagggccccaggtcactaccaaacacctattgaaaggtcaaactaagaaactcaggtgccaagatcatcaatccaagttgtaaataccttggagaaagagaatggatcatccctctttgccctccagtgcccagcacagagcctggcacccaggagaaccctctgagttcaccgacaatgccttcctaaatgaactggtgatttactgccttagcccaaagaacacacccagatgtggccaggggtgaaggcagccaaagaaaccaccagatcacaatgtctaaataatacctacaccccaggggtagtctctgagagaagggtgtcactagccacagaggcctgcaacttcacaccaaaagccaggctcccaggaaagaaaggggggagggaaggaaggagagaagcggaaatgtggtaggaaggaagagaagacttagaagggaggcaggaaaggtgctttttttaggcacatctgaggctcagatatttacaaacaccatctagcatgttatgatggcaagcatgctgagaagctaaaggaagagcaatttctgaaaacacttagaagtaagtaggcatttactccaaatagaaactgcagcacctgtcagcagtctcgagtctgctttgaaacttgatgtaaatactgcccctcccacccctctaccccattcctgtatggtggaaattagaaggaaaaaaaaagaatatttaaaggagttgagggttgctgggaatggtaatctccatttcaggtcctaaatatacaatttctttaaaattacaaataaaatgacacaatcacatatatttgtttcactcctacagtagtgtgatattctaaaaaactggaaccttagttttcagccccatctgccagctcaatcatggtaagaatgccactaggctgacaagagcccaacaacatggttcccaggagcaggcaatgggagataaagactctgagaccttgacttgtttctaccttggacaccaacatgttctggaggaggtcagtttctccacctgctttgcccaagaagctgttccttgccactcccagcctcactcagtacagggaagctggtatgccaccaagcccagtctaaatgagagggattgcctgggcaaggggtgttcctatcagtcttgctgctgcaagtggatagtcagtttgcttggctaagtcccaggatcttacgtacttaacaagtcagagtccatcaaaccctgtttggcatagtccatccagactgtttctattgggacaaagtcctgtatgtatggtgtggggaacccctgcctccttcatgacagtcactccccaggggctacatcccgtgcactattctaccaactatatctggactccagttctgaatgaaccaaatgtttaccaccaactctgaccagaccctattggactcagcctagcactgcacagccagatatccaggaatgaactagccctatccaaaccaaagctaagcatccttctcatagctatccatcttagaggcagaggccccaaaagccaaatttgtccacctgacattcagcagaaagggctatgagaggtacacagctttaataaaaaagactaaaggttcttttaagatatcagtgtccagccttggccaagaccagagaagccctggtgagagtactgtgcatctatctgtgcatctgtgagttctggaagctttgatctcatcctcaaaagggggttaaaatttattgagtagctttatgtcagccataatgctaagcactgacatatattatctcatttagtcctcagagaaactctgtaagataactactattattattttatagatgaaataatgaagattttatagggcacagggaaacgttctgagagctcgctatttggtaagtggttagaacctggatttgaaccaaatccatgattccaaaatccacggtttctctaaactcctataaagcctaggctgctgcttggagtttgtgctaatatgcgtaactgcctctctacccttagcccaatgtggtcagcctccctcactacagtgcagcttagctcaggcacaggccccaagctctccccaccatgggaaaaggttacaagccagaagaacatcagctgcttcttgctggccccatccttagaatgctagacacaaagcaaggcttgttttagggttactgtttgctatatcacatagaaacttacagaactagaaaatatcttctgcctaatggtcagcatgagctggcctagaccagtcacctggatgactgtcagtcaagatgatgactatttacattttggagggatcccacccaggacctaggtcccttgatgccacctcccacaagtgctcccttacccacctgctcagagtcccccgaggggctttagtgccaccagctccgtgggtgatgctggaattcttgttggcagtcatggtcatttcggctctctgcaaacccagagccctgcaaagacgacaatgccggtaagccaagtttctataggcagccaaaagcaccttgaacatcttccagatgacctccaaaagtgccaagagggtgtctgtggcaggtagtagaaactgctttcccacttaatgtttaactccatgtgttacagcttaagagaccccaagaaacccctggcctggaatacggaggagtgtgagctaatttgattgtgagtgcaccaatcagcactctgtgtctagctcaaggtttgtgaacacaccaatcagcaccctatgtctagctcagggtttgtggatgcaccaatcggcactctgtatctagctaatctgctggggacttggagaatctttatgtctagctaagggattgtaaatacaccaatcagcactctgcatctagctcaaggtttgtaaacgcaccaatcagcactctgtgtctagctcagggtttgtaaatacatcagtccacaggctgtatctagctaatctagtggggaggtggagaacttttctgtctagctcagggtttgtaaatgcaccaatcagcaccctgtcaaaaaggaccaatcagctctctgtaaaacagaccaatcgactctccgtaaaatggaccaatcagcatgatgtgggtggggccagataagggaataaaagcaggctgcccaagccagcagtggcaacccactcgggtccccttccacactgtggaagctttgtcctttcgccctgcaataaatcttgctactgctcactctttgggtccacactgcctttatgagctgtaacactcactgcgaaggtctgcagcttcactcctgagccagcgagaccacgaacctaccagaaggaaaaaactccgaacacatccgaacatcagaaggaacaaactacagacatgcggcctttaagaactgtaacactcactgcgagggtccacggcttcattcttgaagtcagtgagaccaagaacccaccaattccggacacaatttcacagaaaacaaaataaacaaagaagcccaagaaactccatctccatccatctctcctcattccttaagttagagtttccttaaacttctatcattctatacagtccatggtttttgccatatttgcatatctcctgacatactatttattcaatatttttcttgaatatacttgaaactgacttccttttcttaaaaagaaaaaagtcacctcattctaaacaataaactattcattcaacaaatatttactgagcacccatgtccacggcaaatgtgatccagtgaagagtaatacaaagtctctgacctcatgcagcttacatcccagtggggaaaaacagacaatgagcacacatgaattatcacgtgtgtgataataagtgtaccttcgtgtataatatgtaaggtgatggtaagtggaataaaaaaaaattaagcaaggttgagccgggcgtggtggctcacgcctgtaatcccagcactttgggaggccaaggcaggcagttcacttgaggtcaggagttcagaccagcctgggcaacatggtgaaaccccttctctactaaaaatacaaaaatcagccaggtgtggtggcaggcagctgtaatctcagctacttgggaggctgaggcaggagaattgcttgaacctgggaggaggaggttgcagtgagccaagattgcaccactgcactccagcctgggtgacagggcaagattctgtctcaaaaaaaaaagagagaaaaaaacttaagcaaggtagagggaaagagagtggtgaagagggtatcttattttaaataagatgttcagggaaaaccattacgataaagtaacatttgagtacacatcatgaaattgagagctagaagtgctcatcattttttctaatacccattaaaataaaagtaatatacattaaggtatttaaatatttaaaagtaaaaaatgtctgttcatgtaccatatattcttagctaatatatcaccatggtaaatgcactaccctttcaggaacactattttatgccaagtaataaaaggaatatgaagattaaaatttaagggtacatttgggttggaaagaaggaagtaaaattatttccatttgcaaatggcatgattttgtatgtagaaaatcctaaggattccactaaaaaacctattaaactgctgagtgacttcaagtaaatgtgcaggatacaaaatcaatattaaagatcaattttgggccaggtgtggtggctcacacttgtaattccagcactttgggaagccaaggcaggcagatcccttgagcccaggagttcaagaccagcctggccaacatggcaaaaccccatctctactaaagatacaaaaattagccaagtgtggtggtgcatgcctgtaatcccagttactcaggaggctgaggcatgaaagtaacttgaacctgggaggcagaggttgcagcaagccaagattgcaccactgcactccagcctgggtaacagagcaagactctgcctccaaaaagaaaaaaaaatcaattttatttctatatactaacaacgaacaatctgaaaatgaaattaagaaaataattctattaacaatagcagcaaaaataataaatcacttagaaataaataaaaggaatgcaagacatgtatactgtaaattataaaacatcattgaaagaaattagacataaaaaatgaaaagacataccatattcatggatcagaaaatttaatattgttaagatggcaattctccctaaattgatttacagactcaacagaatacccatcaaaatgccagctagcttcttttcagaaattgacaagctgatcctaaaattttatggaaatgcaagggatacaggacagccaaaacaatcttgaaaaagatgaacaaagttagaagactctgagttgccaattaaaaaaaaatactaaaaagtaaccaagacagtgcagtactgacataagaacagaaacagagatcaacacaacagaatccagagtccagaaataatcccttacatttatggtcaacagattttcaataaggatgccaagacaattcatggggaaagaagagtcttttcaacaaactgtgctgagaaaactggatatccatatacaaaagaataaagtagggccccacctcataccatatttaaaaataaagtaaaaaatgtagtatagccctaaatgtaagagctacaattacaaaagcaacgctggaagaaaacagaagtaaatctttatgacattggattaggcaatggtttcttagatataacaccaaaagcgcgcacacacacacacacacacacacacacacacacaaaggacatgaattgtactatgtcaaagaaaagaacttttgtgctgtaagcaataccatcaagaaagtgaaaagacagcctaaataatgggagaaattttttgcaaatcatgtatctcctaagaaaattgtatccagaatatataaagaattctttcaactcaataataaaaaagtaacccaattaaaaattagacaaaggatttggaacagaaattctccaaaggtataaacttggccaataagcatacgaaacaatgctcaatatcattagtcattagggaaatacaaatcaaaaccacatgagatattacttcacatccactaggatttctataacaaaaaaagacagataaaaacaaatgctagtgagactgtagagaaattggaactttcattccctgctggtagaaatgtaaaatggcacagccactctggaaaacaatttggtagttcctcaaaaagttatactcagagttaccatataaaccaggatgacccactcctaggtatctgttcagaagaaatgaaaatatatgtccacacaatcacttgtacataaatgttcataacagaattactcatagtagccaaaaagtggaactaacccaaatgtccatcaactgatgataaacaaaatgtggtatatatcaacacaatggaatattattcagacataaaaaggagtaaagtactgatacattctacaacatgaataaaccttgattccacttttgtgaaatgtccagaacaggcaaacctacagagacagaaagtaaactaggagctgcctagcactggttgagggtggcagaatgggacatggctgataggagtacggggtttctttttggggtgacaaaaatgttctagaattagatagtggtaatggttgtacaactcttgtgaatatattagaaatcattacattatatcaatgaattttacagcatgttaattacatctcaatatagacgttaaaacttaagagctaaataaatctttttaagtgccttggagagtgggtgtgagtgacaacacaaacgacacatcaagcatatttccaatgtcaaggtgcaccacagcctaggcgaacaccaccatcacggaagctgaacagtttacaaacagtagttctctccctctgattggtatcctccatcacattggccaaaatgaagtatatctggatgtgaaagttaaacatatttatttatggccactgatgaccttaatcctggagaccatcttacttattactttggtgcaaataagtgattggttttgatgataaaaataagtcaagtcctaattcttgatagcatttatacttccttcctaatctcaagatgaaatgtactagctctaattttaacttcgcataagctctcagggttgtggttttagtgatggtgatagggagtggtatgttaactggaaagagaggaagcagccagtaggcaggggatgattagctgatggtgacagcaatgaaacatccctccaaggtgaatacggcagatgcttctggaaaaaggaaaccaactctaagcctcacttttacccttcataaaatggagttggtccagctaacttttttctttttggtagagatggggtttctttatgttgcccaggctggtctcgaactgctggtctcaagtgatcctcccgcctcagcctcccaaagtgctgggattacaggcatgagccaccatgcttggccctataaatttaagtctatattaatagcataacattagtgatggtgatgatgatgatgatgataaagtcaatcttgcccccagggcatctacgcacactggctctagtgagatactctctacctgtatcagcccagtgccaagtaaagtgcttggcatatcatattgctatatgtacaacagagaagggagagaaaaggcaacctctggacattttctcaggccagttttcagggtcctcaggaagcacagtgctataggaatcaacttgctaagcatcagttttcaactgtagcaatgatcacagtaaccatcaccatccatgaaaacaacatttgacctgctctatcagttccagggcaggcccttggagaaaaggcaaaagatttgtggcatgaccagaaactgaaacatgttaaaaaaacatgatgaaaaacatattctttctttccctgaatttctgctttcaggagggtagactcactgctctgaaatgctatcatgcagttgtatatgagaacacagagccaacttactaagaaagagaaatgtagttgactctgacatctgggtggctaagaagaaaaatcctgtgaagatgtaaccaagaaagaagcagaacaaaattgcttccaggcccatgacagggacccttagtcacatttctccaagagtgcagctgccattctcagaagtggcctgggaattcaggcatcttgagctggcactgctgagaacctcacaggggcgcactaggttagaaacacagatgcctactcaccagcctccccaccaactgctctctctgggccaggtctatcaggatcagagaataatttgggacttgaggagctgaaggccaggttaaccctttacacctgaagctcaggcttgaggactctcagcattctggcttcctgggctacaccatttctccccacctcctacaagcagccccaggccctcatctatgcttttagcctgatatcctggctagtcagactgcagggagagaagacactcctaaagcagaggaaatgcccatgggaatggagcagagactcaagcatgatgagaggcttctttgctagttcccaggccctcaatggcaaagtctaggcagaaactgcatgtttagaaaaggaaattgttcaattagcatataccatccatccaaagttcctcaaaaacacagctctgacaaattatagacaactatctgaagagtaacaatccagagaaaggaatagaataaggtacctctggaacttttctacaaactgcatccagacaaacaggcacagtcgcaggccccgaggggcagtggaaaaacacctgccttgagtccagccctgcctctgacaactgctagttatgtgaccttgctccagtgagtgtcaaagactcactttgtcactataacagccataatagcaatatgacctacctcccatgattgccctgtctggcaatagaagcttaaaaaatgtttgttcttccagatcacacttccctaggtatttggaagacaacctctccattcccaagtctgagtcatctttcagactccctagtactatcattccattcactgaccctatgtgaggcactgtgcaaggtgctaggatattaacatggaagacacagtccctgccctggagaagctaactgtgaagggagacaagaaagtaaaaagtggactccaggaaggcctcatcagaaggtgacatttggattaagctttaatctgttacccacagtaaggggacctaaggaaaagcaaaggagcatttattatgagacacgctgctagacttttaaacatgtaattataacagctaaagttacaagcacttcatgtgtattaagtcatttaaccctttaacaaccctgtgaggtgggtactattaatatttcacagggttagttacactttaccaaggaaaccaagatagagagcagttaattagcttgctccaagtcacacggctagaaaggggcagggatttatgaccaggtggcctgcaccagctctgggccaggaccctgtactgcctccaactgtcttctaatttagttctcaccattctacaaggtagtgataatacagtctccttttttctgattaggaaatttaaattcagagaaattaaatgactggaccaagatcactcacctagtgaaggaacagagcaggaatgtagacccagctctgtctcactccattgtccacttattttctttaacattgatggggtgctttaaaatgcagagtcccaggccccacctactgaacgggaatctgtggggatggggcctaggaatctgcattttagtaagcgctttaaatcaagcttatatgcccttaagtgcaaaaacttgtgtcccacagcatgttctctagggacttaatggagtcacgactcaccatcttcccaagaatctgcctagctatgtgcaactaaaagatggcactcagcccctcttcctcctacccccatcccattagcttcttccaccacacagagaaccactggccctcaaccacaaaggaacgcacacaccacgggatccagtgaaagcattaccaatggctcatctaagccatttcgtcagtctccaggtgtgctccgtcttcctgtattttgaaattactcttcctgccacccaccctgatccctttgcttgctttctcctcatttctaagctcctgggaaaaagagtttatatcagtcatacactggtggtctgcagaagcaaaaacatgtctcacttggccttccttttatttttaaataatttgaattagttgtcaagcttaagaaagcaggtgaatagaaagaaaaattcagattctagcttcttttgaaaaatgagaaaatttaccatcactgtgtgcactcctatatgacaacagtgggccagagctgagcacaagtggcccagttagatgccgcggctccctccaccgcagcgctgtgcctcctcatccatggcctccacctggtccactcggctctaacctgacctcccaaccagcaggtaagtgtcgcagctctctagcctgcatcccagcaggaagggttaggaggcacggcattggcaacagccacacaaaacctcctggacggctgggcaggagcagtgcagggcacagcctcctggctgcttgaaacccccatcaattcccctcactgccacaggaggacagacctcccggaaggctgacagcttttgctcagtccagccttcaccagacaactctctaccatcctgagtgccctttctccctctgacccgatcccatcacctgatccacagaggctctctcaaaggtccaagaagggaccgatgagaggtcagtctctgaagggagctctttctgaggggtgccccacctctaagaatggaccttcctatcctagagcaaaaaacctgtctgtccttgtttaggtgacatttctaaatgtctgtctgatacttttctgcaggcataaatgtggatgtgacagtatgccttgctcttgaagcaggagacagctgagccctgagtgaagaggaagaaatgcaagcatttggaggaaagcctcccattctgctgaggttaatgtcaccactgagaggaaacgtaaacattgcccagcactctgctttatagccgaggtaagaagtcaagatgcccgaaaataggaaacctctcaaccacatgagagaatttctgctacatctatgttccactactctcctaagcaattctgctcacgtggaagtcaaagtttaggcagcagcctaaagggacagagaaggtgggaatgggaacagagctcttgtgtgtgttctgagaacatggtgagagccaggaaagggccagcaatacagtgacagtatagtgacccaacagtgtgcagctgtggcctgattgccctgggaccaacctgcctactcatcctgcccagcaaacatctcctcagaccctctttaccttcttgccaactccttcctgcacctctcctcatccatgggccctggccaaggacatgaggaacagactggcagctccccagaggagggctgccaagagtctcagcaaccaatactggccctcagattctaaggagcttaacaaatgcaactaaatcaggatgatccttctccgcatgggacttcaacctcaccctcagcacttgtgtcttctggatcctcccatcagcccctgttcttcctgaagcagcaaggcctcctgctaaattcctgtggaaaagctcccctgcttcctagaaagagctaagctcaccaatgctataagcaaaaggcacagcccctctctgcctaacctcccgacagatcgacgacttgcctggttctctaagggataaaagggctcctagaaacatactaagaacctgagcccctttccttctatcttctcagtgctgcctccattctctccctgccatacctcccttcccctgacctgcccacacaacccagagccgctgcaagcttcagtaaccttagattaagttccttgtaagtacccaaaccaagattctcaaaaatgtgagctttcgcctgtaatcccagcactttgggaggcagaggcaggaggattgtttgagcccaggagtttgagaccagcctaggcaacagagcgagaccctgtctttactaaaaataaaaaattagcaggaggttggtgatgcacacctgtagccccagctacttgggagcctgaggtgggaggatcacttgagcccagaagtccaaggctgcagtgagctataatcatgacactgcactccagcctgggtgacagagtcagaccctgtgagaagaaaaaaagagaagagaagagaaaagaaataccaggaaggattttctcaagactgtcccattccctacaaaacagtaaacccttttctccttcactacttctatacacattgtaaatcttagatcttctccattccagccccaggtccagaaagcccttcaaggaaaaatgtaatggggatagtgagcctggtcaagtggagaggaaccaacatttgttttgctgggaggtcagaggataggtgggtgtttttacaggcccccgtgaggctgaaatctccctcaatcagccacaggaaagacaatttttttgttgttgcataataatcagaaaaaaaagtaagaactttttccatctcttcactgtccacttatcattcccacatcctccttcccaaccctcctcctcaaagaaagccctttaagtctgctttttcaacctcaaccatttttcaatcccttttcctgccagatggtccttctccacttcagtgcagatcctgcagaggtttaaagctgggtttacacacttcctgaaagcctgaattggagtgaggtcttgttaggcaatttcaggccaaaggaaatctagttgtttctcacatagttttaaaaacctagacatggctgtttctgccattctggaaactcagcctctcagcaagtggcttatcctagctctgtcaagactatggcacctactctgcccaatatcttgtcaccacttggaaaaaggaggcagattggaagcctgatccataaaaaaccctgctcctggggaccaaccactgccctctttcgctctggcaaggagaacatggtgggtcctgcaatttcgatgatccagaggccatagtcctatcttagagcagcaccttcactctggccagccacatctcactggatgacatttcctgcacatgccaggaatgttcatgccgccaagcttttgttcaaccaattcctttgattttcagtgtcccttgccccccattctttcttaaatatccagttcaagtgtcaacttcttcctgactctaagtcctgacctccttctcacccttcccacgctctctggtctagctgagctcaacctgactgatggcaagctgcctcctctgctctagaagaaacttatcatccacaagctgcaccttctccgagtaagactaggaaataataaaggctaaagggactgggcaaaatcctaatacctccgttttaccacagatagcttacggagactactccacctctataatgagaacacaaagaacaatgagaagccatctacaaagaacagtgggtactcagagcccagtgctactggaagtctccgggctggggtttagctttccctccagctctcaacttcaacacctcctccctcatcctcactcttttagctgcctctgcttccgattccactaagaacagatcctcaatgagctacactcatcacatgtactccccaccagcatcatggctcctgtcaccccatctattcaaaactctcaaaaccatagctcccattactcaaagtaaaaaccaaaatctttacaatgacttataaggccctccattgtctgggtcccttttataactctggccccatttcaactactctttctccttcactgtctccactccagccacactgtccgataccatgtgctcaaacacaccaggtgtgttcctaccccagggccttcacacctgctgtaccctgtaagtagaactgccctccctagatagggtgaacagcagttgggctccacagtccaggcccatctctagttacctctggccttcccagtgaagggtctgacccacttacagcaaccacaaccactcagaaaattcaaaagggggcctccccctgtgaaaacccaaacgattctgggcaggagtagcttcagcccaagaactcaactaaaattgctctctgaaaagcttataagaccaggcccagtggctcatgcctgtaatcccagcactttgggaggccgaggcaggtggatcacctgaggtcgggagtttgagaccagcctgaccaacatggagaaatctcatctctactaaaaatacaaaattagccaggcgtggtggcgcatgcctgtaatcctaactactcgggaggctgaggcaggagaatcgcttgaacccgggaggcagaggttgcggtgagccaagatcgcgccattacactccagcctgggcaacaagagcgaaactgcatctcaaacaaaaagtgataaccataatgaaaaacactgacaaattagactacattaaataagaactttgttcatttaacaaatgccatacagacagtgaaaagcaaaccaacagagtataagacaatgtactcagtagaccatccaaccaagaactcatatccagaatatatgaggaacttctacaaataaataaaaaacaactcaaaagaagaatggcacaagtagaacagatacttcaccagagaggatacccaaacagtgaagagatatatgaaaaggtatccaactttattagtcatcaacaaaatgcaaattataactgagatgtgatacccattaacatacccactggaatggataaaatgaaaaagaaaatacctactgttggcaaggatgtgaagcaactggaattctcaaacactgacagaggaagtgtaaatcaatactaccactttggaataacgttgggtattatatactaaagctaaatataggtataacccatgacccagcaattcctttcttagttttatacccatcagaaatgcatacacatgcatactaaaagacaagtatgagaatgtgcataacaacactattcataatggctataaactaaaaattcaaatgctcataatcagaagaagagaaggcaaattttggtattttacataatgattactatacagcaatgagaatgaacatctgcagctacacacaacatggataaatctctccattattctgaataaaagagccagaaaccaagaatacatactagatgagcctatttatagaaaacaataaaacccaaaaataaatcaatgctattagaagtcaggagagtggttacccataggaagactagagggagattctgggatattgataatagactgtttcttgatctgagtgttggttacatgggttcagttgtaaaaatttgttgacttggatacatatatacattcatgttgtatgatatacttcattaaaaagtttaatatagcaagcaggatacagagctcagcagatttgggaacactggatccacagagcaaagttattaagaagcagtagagaggccaggtgtggtggctcaagcctggaatcccagcactttgggaggccgaggtgggtggatcacttgaggtcaggagtttgagaccagcctggccaacatggtgaaaccccgtctctactaaaaatacaaaaattagctaggcatgaaggcaggtgcctgtaatcctactcaggaggctggggcatgagaatcacttgaacccgggaggcggaggttgcagtgagccaagatcgcgccactgcactccagcctgggcaatagagcgagaatcaatctcaaaaaaaaaacaaaagaaaagaaaagaaaaaagaagcagtagagggtagagggtaacactggaactacagatcttagatcattagggctcaatttccctttggaggaaaacccttttttcctcaaatttggaagtaggagaagaaagcacacctatatagccaggctctgctggttctatgcatgtatttatatttagcttgtgtaatcttagttacaactatgtgaaatagatgccattatctccattttatggatgaagaagctgaggctgaaaggttaagtaatttgcctagcgtttcataagcagcagaccccagagtctggagaggttggcatgaggctctagaagtgataccagagcacattagtcctttggtctctgtcatatcttgtggcaggaagccaccctccatcccaagtacacccctgcagccccactctatctggataaagaattagaaaaggggctgggcatggtggctcacgcctgtaattccagcactttgggaggtcaggagttcaagaccagcctgaccaacatggtgaagtcctgtctctactaaaaatacaaaaattagctgggcgttgtggtgggtgcctgtaatcccagctactctggaggctgaggcaggagaatcgcttgaacccgggaggcagaggttgcagtgagctgagatcgcgccattgcactccagcctgggtgacagagtgagactgtctcaaaaaaaaaaaaaaaaaaaaaaagaattagaaaaggatattagcagaaggtccaacgcctggcccctaaattctggttgtcaaaatcccatttttctttaagccatctagttcagaaggctctgagtcaacaacaaataagcgtaagagatgcctatcatcattcttccccatctagggaaaggggctcacacacacagaccctggtcaaacaaagaccttccccctaacaatgcagtctgctggagctgagactgcagagaaagagtctgtccatccacctgcccaactcctttaagggccatgatgatgaccgaacttgcctcttcttcctcctttaaacagagcaagtgctacttggcagtttcaggtctgtgcttctcagactgtgtgctgaggtgccccaaagccccatgatgaactcacagggatactgctaaatattttaaatctttgagggaaacagagcaacactcaacatttgttgaacaccccatgagttcacagcttcaacaacagactgcattacattcttttcgatgatgtcatttctttctgaggctgggttttcagcagttgctgtgataaaaagcaaataccatgtgaaaagcaatgtggaacaggaaataagcatggcactaatcaatctggttccaaggtctgatatgctatgcagtacctagtacatcccattagtaagtgtggttaagaatggaatataaatatttttcctttcaatttcttgtatcatttttttttcagatggctactcagttgttaggatataaatactcaattgtttaaacctacttaaggccaggcacagtggctcacccctgtaatcctagtactttgggaggccaaggcgggtagattacctgaggtcaggagttcgagaccagcctggccaacatggtgaaaccctaattttactaaaaatacaaaaaattagccagaagtggtggtgcctgcctgtagtcccagctactagggaggctgaggcaggaggatcacttgaacctgggaggcggaggatacagtgacacaactgcactccagcctgggtgacagagtgagacttcatataaaaacaaacaaaaaacctacttataaaagaaaacttaggtatttattttgggctatggacactgtaaaaaaaaaaattactgaaacactaaggcccatgaactaagaaagtttgggagtctctgcagcaggtgtttttaagtctctgttcatggagccaagaggagttcccagggcaggcccaacccagccccagaagtgggcaggagtcaacattcaggcctgtggcagcacactcaggcttcccagagtggctggtagaataacccctctgcctgaacagaagtgcctgcacaccagttatccctcagcccaggcgcctgcacatccacatcagcctcaccctaggctcccaggcacccctctgaactccctccctgaaaagctctattcagctccaacctcatgaataaaacccaaagacagcccagaagcctgccggccagcaggggtcttccacacacgctcagacttgggcaatgtccacaagccaaatcattaatccaaagagacagggagcaatgggaaccaaggagagggcttccactgacagaccatccactgaaaggccaactcaggctttctgggtgaagatctgcacgaaaataccttctttgttcccacggggtttcttgccagctatgcgccccacctccattcttccttgaagtcataatcctctgttggtgacatcacagctgttgatacaatagtcaactgttgtgatgtcacaggactcaacttttgtcattttaggtgggggtgctgggttggagaatgtgacagaggacaagaatagaatacagttatagaactggaattcgctttttcatgctaatttccctggtaatgaagggcagtgactcagaaaaggaaaggcaagcctctggcagcaaggctgtgtgtagattcgtctataccaagggaaggatggtggggaggcagggaggagacaaaagaaaagaatttcgaattccaggattggccaaatatgaagatgatctcagtctggccaagtccaggaccttctctttccctcacctatcgcctgagcccagagtaaggagaggctccaggctggaacactccctggaaattaatgcgtgggaggtggtattctgttgtggactcccaactggcagagggacagactatcagtttggactgagtcctaaggacagtgaccaggatggagagggcactcagaagcatgtcacaggagaaatgacggaaggaactgagaatgtttaccctggagaagagaaggctgtggagcggggagggtgatcattggcttgggaattcggaaaggctctcgtgtgaaaaagggattagatgtgttttctagggtcccccaaggagacctcagaaaatgagagaccctgagaggccaaaatgaagaagaagttttaattcttaaattccatttggagactatcaattctttttaattccttatttctcaattacagaatacgttccagaggacaaggactgtgttgttcatcacagtattccagaacttaaaaggaactggcacataattggagcttactaatattcgtcaaaaaaatgaacaaatgaggcaatgacagtggtcttgtgaagctgctgctatttacagggactcactcattccgcaagtattttttgcacctcctaccacactccactcagttacatgctgggaataccacagtaaaggtagataagattagtctaccccctcgcctttgagatgggcatgggtggcacctaaggtcgctttcaatactgagattcctagattcttagagttgactaaaaagtttaaaactgagaggaaagagtaccccaagggccacagattaaccctcccttctactatcaccactagagatctggtaatgaagggcagtgactcagaaaaggaatggcaagccactggcagcaagggtgtgtatagactcatctataccaaggggagttgggagaacagggagggacaaaagaaagagatctagatcgagctgttccttctttctgagctgggagaggcctctcggtgagaaagcactgccagaccggacgagagcaaccaggctgggcacttatccaagtacccctccccaccctgagacagagtgggctccctcaacccagcaataaaatctgtatggcccagttaggtaatataaggtattacatatgacctcacttccctcaaggatctttaatttatttatttatttattatttagagattaggtcttgctctgtctcccaggctggagtacagtgatatagtaatagctcactgcagcctaaaacttgggctcaagtgatcctcttgcctcagcctccagagtggctgggactacaggtgcatgtaaccatagccagctaagtttttaaattttttgtagagatacgggttttgctattttgcccaggctggtctcaaactcctggccttaagtgatcctcctgcctcccaaaacactggcattacaggtatgagcaaccgtgcctggccaaatgtgctattttctaatgtggtttgtaaactggtcaggaaacaattcccaaagaggaatcaaatctaccatcaggtgagcagacccctttagtagatgtgactagcaggctatggtcacagcttatactttctcccttttcccaaagtcctcaatctccctgtaggaagcttggggaatgtgcctcctgccctcttctggactagtcagcatgctcaccaagcacactaaagccacccaagtcacagctgactcatgccattgctctttgtaatgaggtatgacatgtttctaagctcttgtatattttcatatttgtagcctacaattaggcatttttgagggatgtagctgactaggggttctgttcagtgacctataattatacactcaggcatcatggtcaatccaggcaactctcaggcctgcaggaacctcatggaagaagccacttggctctaagaagctccagagaatactgtagtaatgtggcttagaagggccacactgcccctccttgctgctcttggaggcactccccctatgtccccttcatctcccttatcactcactgcctgactcagcaatgcctgccaagcccaagtgctgacacatttgtgtatctagtgccagcagagaaccactttgagggacacagtctccactgccaaggtaacagcaacgtaaagcaacttctttttttttttttttgagacaagagtctcactttgtcacctaggctggagtgcagtggtgcgatctcagctccccgcaacctctgcttcccaggttcaagtgattctcgtgcctcagcctcctgagtagctgggatgacaggctcccatgcctcaggtatgggaggcataccaccactcccagacaatttttgtatttttagtagagacggagtttcactatgttggccaggctggtatcgaactcctgacctcaactgatccacccgcctcggcctcccaaagtgctgggattacaggtgtgaaccactgcgcctggtcataaagcaacttctaaaaactcccataagcgtctcgtcttagaaaaaaggggtcacacacctgctgctcatgggaccctgcagtcagctgctgtgcctccgctctgagccagcctttttgccacctgttgcagtggccacactgatcctaatcctcccccatgcaaatgcctaccacccagctttaccactgttcccctggctgggaaagaaggactggtttagcacaaaaaatctgtcccttatgacatttcacatatacatttggccccaataaaactcatttcttgggccaagtgcggtggctcatgactgtagtctcagcactgtgggaggccaaggcaggcagatcacctgaacccaggagttcaagaccagcctgggtaacatagtgaggctccatctctacaaaacataaaaaagaaagaaaggggcaaaaaaagatttcttgatttttttaacagcagctcaaatcctggcatttaatcaaagagactgccagtagcccaccttgtgtagctgtgaagggcaactgtggcccatgctcagagcagcatctgcattaagtatgagcccagtatctaaactacaattactttgcaagtttcccttcttccccaatgcaaagtactttagagtactttatacttttcaaaaacactttcacgtattatctcatttgagtctaccaataagcccaataggattaaatgcaaaaggtatcttctccatttcacaaaggaggaggctggggctcaggaaggctaagcatcttgccctcggttcactcaattagtaagagtagaaccaagtccagaattgctctgcaatcttcataaatcaacaattagtagtcactacttcatagagacattataaggataaatgaattaacatatgtaaagtgcctggaatagtgtctggctcatagttaggactatgttatcattattaacagtataatcaccaccacccagaatcctcaattccaaagctacagctcttttccttctatcctgctgcattttgctcagaaaatagtttcatctcaccttgagtgagtccagacctaatccctatagtcagtctatggaacccagaactcactgggctttttttcttttttctaatttatttaaaaaatctttttatgagcagggtcttgctctgtcacccaggctgaagtgcaggggcatcattatagctactgcagccctgaactcctggctaaaatgatcctcctgcctcagccttcccaagtagctgggatgataggtgtgcaccactgcacagactctatcttgccactccacgaacgactccatacttgtgtgcacagggaagtacgcacaccccaccttttctgccagtctgacactcatctcctagcctctctgatagcacttatgccatgttagacacctttctgtggtttgccctgcctgcagtacatgaccttcacttagatccaattcttcattcatttagtttctttcttcaacaatcatttcacaagcacctaccctttactaagccccatactagaggcttttcctcgaaaacatatcaaatgaaatgtgcaagagcagcgggatgcacaaggagctgtggcagcacaaagacgccagaaagtaaccgtcagcaggcagcacaaaagatttcagaggaggcaaagctaaaatgggttttagagcaactagagtgctctcagcagacaaggggagaaaaggacattccacgctatggggaacagtatatacaaaggaatacaaagcagaatcatatagagtatggggtatacaatctcacactaccagcatgcaggggctgtgagtgtgtgtgtgtgtgcgtgtgtgcacatgtgtgttactgtgagataaatatatctatgtattccatatataaaataatgaatatatatagatatctctctacatataataaggaatatatatatgtgtatatatatacagagagagagagagagagagagagagagagagagagagccttcttcccagttctgggcacagcttcaaaaacccttggcatttcctgagggatgggggtgagaggagcctactttgtgattcataacaagtccctctaccatacctgaatttatgctaatgaagtgaggatttatttcttacggttccagaggcttggaagtcttaagattgatggctgaatctggtgcgggccttcttcctgcatcatcccatagcagaaaggcagaagggcacaacagtacacacaaaagagagagagggcaggagggggccggacttgtttttatcagaaacaaactctagcaatgacagcattaatccattcatgagggtggagccctcatggcccaatcactctgaagggtcctacctcttaataccatcacaatgacaatcagatttcaacatgagtcttggaggggacattcaaaatatggcatgccgacatagtgaaacttccataaaaacccaaaacttctgagttcagagagctcccgggttggtgaacacatcaaggtgccgggagggtggtgcaccctgagagggaatggaagctctacacacacacacacacacacacacacacacaccaaaattttgccctatgcatctcttccatttggctgttcctgagttgtatccttaataaactaatagtaatataatactaatagtagggttaatagtaagtcaactgtttttctgagttctgtgagccattctagcaaattaccaaacctgaggagggggttgtgggaaccgatccctccaactttatagtgagttggtcaaaagtatgggtggccctgacttgtgattagcatctgaagtggggacagtcttgtccccacttaatctatggagattatgctagctccaggtagtgtcaaaattgaattaaattgtaagaaaccccagttggtgtccagaaagtttggcaaattggcaaatgtgagagaaaaaaccccacacatttggtgtcaggagtgttgtgagtagcaatatatcatactaatagtagagtgagtgtgagagtgtgggtgtgtgtgagagagaaggaaacagagacagggaaagaaattagatatgggatggtgcaaaatgaggctagaaaggcagggataggcctagagtgccatgaccaggggacacctgggcggctccagcgttccagcaaccttacacactgaagcctcaagggcatctccctccaaactgcctgggggtggcaggcagctgggacaacaaacatcaagcctgcctttccaggggtgagtggcaatcccaactccttgggtatgcttacagcgcaccaattttcaatgcaaaatcctttaacaactgttttctctctctttctgtctttccttcccctcctcctaaagaagagctgtttatccctcttctcatttctgccccgctctgagccctgagttttagtgccagtgcttttacacaaatccagctttacatcttgagtgaaatataatttcataggaatgtaattctggaatgatctcattgaaaaagcacatccagcaaaggccatgagcagacttcaggccagcccattcacacccagagccaagaagactgcagacccctttcccttaaatggagaatgtgcctgggacccaaagcaaagcacaccagctacctagggatattctcctgcctacagccagccagcctgcctgcctgcagaccacggccagggcccacagcagcgaccaccatgagccactctggcaccatacaaggacagactcgagggcatccaagcaaacaggcctcaccccagagacgctgcctctgaccctcgggagggctctggctccatgccatcaaacatgagctgaaaatattaacactcccctgtcatagccccatcagagacagaagagtatccagaagcccagctgctaaagatcctccccacacctacctgccttcctaactctcggaaacccaattaccatctgaccctattgagacagagtcagaaagtggggcatttgactctgaaactagatgtcaaagccaggcccagcccagtccagcagagctgaggcagagcagaactggggaagaaataatgtagtctgatggacgctcaaaaaatcctactgaaaaaaattaccaagttggaatctctggaaaaaatgtcctcattccaaatctgttccccacccccaatgaattctcataaaatggaccagaaaaggaggaaaaaaaaaattaatggcttgcagggtctatgggaactctctgtctctctgtactatctttgcaactgttctgtaaatctgaaactattctaaaatgtaacatttataaaaaataatggcttatcacagtttcctctgtaagaaacaatgggaaaagggtgatctttgggtatgaaactctgcctctaccagctatgaagctttggatgtgttgcctaccctctgtaagcttcagttttctcatctgtaaaatggagagaacagttccaaccacgaagtgctgttgtacagattgagtaagatagtgcatgcaaaggacttaccactgctaaaagtgctttctttctgggcagcagcagtttctctgctcagtcagccttcacgttgggttcttgacaactgcagctggagaccctacctccacccttcagccctacctgtctttatgactagcagtctcttccagaaacggcaggacactttaatcccaaagcacagtaatcacctgaaaggctgaaggctgccttatagcaagttctgactagtgaaagcacacctttgttgacagaaacatgttctccttcctgctttcccttcctccattagaatctagtgtcactgccattagctgaatgactttcctaagggttacagggatccatcagaaggaaagccagaagctgacagagttgcgcttctgacagagaggaagtgtgctctcaaaatcgccacagaagattcttccccttcagtagcaccactaccatccaccatctcatcaccaccaccccaactcctggctgtgccctgctcccatcctggccccacatgaagctgggctgataaactacaaatccacaagtcaaggggcacagcaagttccccaaaaccaagacatatgtctcaaggctgggcaggaagttgcccccaggccctgaagcccaaccccggggcctcagacaccttgcctcttgtctataggatgatgttacttgcttctcccctggggagactgagatgagtgggcagtctaggaaccctatctaggtcttcttatttttttcgttttttttttttaattattattttcacttttttttgagacagagtctctctctgttgcctaggctgcagtgcaatggcgtgatcttggctcactgcaacttccacctcccaggttcatgagattctcccacctcagcctcctgagtagccgggattacaggggcccaccaacacacctggctaatttttgtattttcaatagagacggggtttcaccatgttggccagggtggtctcgaactcctgacctcaagtgacccgcccgccttgacctcccaaagggctgagattacagacgtgggccactgtgcctggcccccatctgggtcttataagtggatggactagagaccaaggaaagaatcaggtgaagaaaggtatagctctgatgtcgtgttatctccttgaaaatcactcacaagaatgtcaaatacttaaaaaaacaaaaaactctcccaagacaaaagagaagtccaatctcaccctgaaaatttactgtccaaataagggagcagtcagtgctagaacagtcaggctgttccaactccaaaaagccctgggagagaggcagttcccgggcttcagattccactgacaggttgtaacccctcaaagccactaatgggcacattctagtggctaattcctctgaccttccagatggctggggtggggacacaccccagctgagacccaaggacactggttcctggcagggagcatgcaaaatctcagcagctccaaccaggccagattaacagccccatgctcaaggacacgctgccggaagcaggacccaggaggaagacgtccttggagccatttcttctttaaccaaataagagccaaatatagccaaatatgaagaaacaatgtcatcttctttgaaatttttctccactttatcacctcatacctagtttactgcaatggtctctggttatacagagagcactttatccagtgccagcccataggaggcactaaataaatgttaaacagtattattgtatgacaagctcccctttattcttctacctccagtcctctctgctcataagtgacagactaagcatcctggaatgtcagtatcatcatgtcattcttctgggctccttaaccgccaatcacaccagactcaggttcccttaattggttccaaccaatctcactttccaattcttccttccctcttcagccagccctggccctaccaccctccccagacctgcccacacagagatacacagacttgcacatgcacacagacacgcacgtgcgcgcacgcgcgcgcgcgcacacacacacacacacacacacacacctacctctctccaggcaggacaccttctgctccaaacatgtccacgtgtccatttctgccccatgtttctgggctcaaatcactggcagcctggagtgctctccttcttcctctctgcttatccaactcctagtatgctccaaggcccaggccaaggtcccctgaagctcaggctgagaagccattcaatccacaaacaatgaccaagcacctgccttgtgcaagacactagcccagtcactgaggacacaggaaggaaaacaacacagtcctacaggctcctgaccggtgggaggggcttcaacatgaactgctctgctcacctgaaccatgcaggcagcagagtcaaccaccagacatcgcaggcagcttgctgtgccacttgtaggggtaaggtgagggcagcacatgaaacccagctagatggggtcttcttacctttcaagacttcaacctttcaaagaagccaccacggcctagtggcttagaatatattctattataagaaccttcattctctgtgaccaccttgggtagcactgccccatcttgctttagaattttatcagctaggctgggtccaacctcattcaataatagccatggtcaactacctctccttagtgccaggcaaaagcctcacatccctgccctaagccagggaacagagagagaatgatctccttaggggttcctaggcctgatgctacttgactacagagatgatgggggtcacatgggagccaacccttaggcctctttagggaaaaagggtaatctgcaattctgaccataggagtaactccacccttccctctcttatttaagaaagcttatgagagagtgaatgggcttgctattattataggtataatcttgcataccttctaaattataagaataggtaacccatttaagattactttggtcctttaactcctgtagtaacaaatgccacgtgatacatgcctcacatctagtcctaagctgctagtgagttacagtgcctggagagaagcagctgctatgagcttccagtgtgccacccccacccaggcaccccaccttggatagccaagagggctacctcggtaaaaaagagatcctaagacagacttgtaagctcaacccagagggtaatcctaattcatttccccctgcccaggggagacaaatgttgctatatcaatgactggggaaaaggcccacatatttttcatgtctcaccctcagactggagtggcgtctcactgcttctagaagattggaactattactgacttggtattcatatggaccaaaggtacctcctgttggacattccttaggcctgtcacatatggtccaagaaagcagtaagatggaaaagagagaccagctaagagctactccaaatgcccacaccatcagatgatcatcccaagtgtcagagatatctgtgaatcaagtgctcaaagctacacacattgggagtgctctaaaattcctatcaatacagttattctttttcccagaaccagaagaggctctcttgatgtaatcttagataccagggaatataatgttcaacccagggaaaaaaaagagagaacacctaacccatccctacttatatttccagcagtggagactcacagtcttcctcatcatccatcctccctgtaatctacctgaacctcaagtctctgaataagcttatctcacatgtgacttagctgttgctttttatagcatgaactattcagcctcctactaagaccatcttttccagagaggctgaatgggtctcagtctctactaaggaagctcacatccttcaggagcttacccaaaacaacagtcacatatttaggcatgctggcttgtacagctcaggtcagccagaaaggccacagcagctgctgaccattataccacatgtgagcactaacggggatcaatgagtcaagccttgaaagggcagaacagaaggaaagaagttaccattggcccttggatcaccagcaactagctcgaaagagtctgcctaatgaggactgcatccagccataacgagcacctagtctttgaagcctgtggcatccagacagtatcacttcctacttgactgctttcagggggccttccacacagccaccccttacactacacccatctccaaggctgaagagaagacctagtgcacactatcttgagaggcttagccacacatttcagtccccgtccacatccaccctccccctgcccctgacagctcaaatattcagtctccacatgtgtctatgtgcctgtgtgtctgtgttttatttatactacccatgtctgttgttagcaacagaaacaaagtactttaaggcagaaaaggcaagtctgccaattggcttgctgctccccgcctgcttccagctcagggaagggctggtaaatgatccctccagctccaatctaccatgtgtgcctacagctcccacgtacccgggggctgggaggcatggtgccagtttggcccacattagtcactgctgcatggggtgccggccatcacctctctctcttcttccctggagggcacaccctgaacacctgattctgtcacctgcctaaatgctgattactgtcgaaaggcagagcttcagaagccagaattcaagaaacccatggtaaagatgaaagggcagttcctccccagactcaagactctggagaactagcccaggctaagttctactttcacgtctttccattcccacttcagtttttctgctactgataatcttccaagttccaatagcaggctccctaataacattgacagtaattattgatcaccactttgttttagctgagagaacaaaacatgagatgtgattcttacatgtggggagctcacagacgaatgtagggcactgagacacaacagcaaacgatgcaagtgtgggacacaaactagaaagacaggacaatggagtggtggaggggacagagcagctctggacggggcttctgtgggagaggaaatgtgagccagactgtaaaggacaaacagtagctggacagaatgagacagaagactgtttgagatgaagaatgagactatgactcaaggtcccaaggcagagagagtggcaaatatcacacccatagcgtttttctcacattcaactgaggctcagccctagcaggtatggaggaaggaaagtggtgtgacttggtaaaaacagaaccctcccctctgggttaccatgctctccagcctctctgcacctacctctgccaaaagcatgctcggggtttcctttttctttcttttctttctttctttctttctttttttttttttttgagacgaagtttcattcttgttgcccaggctgcagtacaatggtggaatctcggctcaccacaacctcttacctcccgggttcaagtgattttcttgcctcagcctcctgagtagctgggattataagcatgcaccaccacaccggctaatattttgtattttcagtagagacagggtttctccatgttggtcaggctggtctcgaactcctgacctcaggtgatccgccccgcctcagcctcccgaagtgctcggattacaggcgtgagccaccacgcccggccaaggtttccattttctgtgctactccaaaatcctctcccttgcatgtcatggaatgcagccagcctaacttcctaaactcaaaaacatcccattgaaattcctggtactcaaggctcctgctcccacggtaggacaagcttcaggctcccccaggtgcagtgtgggccaggagcttgaactattcctgtgttggcctgggtcaagctgtgagtctgattcttttctcgctagagcaggagaaggggggcagtatgaaattgtaactatggttcctggaagccaggacaaccatctttcctccttccattcatacttacagtcatgcatccattcagctaatatacaccaaacaccaaccatgcataagccaatatgtttagtgctgtttggacaccaaatgcatcaggtatgggtccatcctcaaggagcttccactctgtagggtgaatacaatagacatataaatctcataaataccaggaagactattttaagtgccattagaaagatgaaattaagtgccactagagagatgccattagagagatacaatgttgaagcttaggtagaaggagattacttccaaataaaggatcaagaacactttacagagagggtgacccttgtgctaggcctggaagatcaaatggcaaaagaatacaggggtattcctacacagatagaactacatgcacaagggcttggaagcaggaaagcagaagacgtatgaaggacaacaaagtgtttgtcagtctgatgggagtttaattgaaagtagaccagggagaaagagagttggaaagacagagacatgtcggctcttagaggcctctgagagccaaatcagggatcttagtttttctctggggaatcacagaagttttctgagaaaagaatgatgggtcagagattatgcttctgaaagatgaagcaatactcagaggtctaggggctacggcagaaaaatctgttcaagtggtccacgagggctaatgatcacaggagggacaagggagagagagaactgaggtaagcagcaagtgcaggatgagaatttctacctttgaagctcaggctgaacagaaaaatcagtaggcagtggccagggtggctaagaggctacacaggcagagaagagctggagagccagctcttgggaggggacagcgaaggagtgggaggtggaaacagacaggagaccagggaagggaagggaatctccgagttcagcatcctaaaagtgaaactgctccaagtgataaagccaaaggtacccgaagaggaataaagacgaagtccttagagttggaaggatggagggactgtgaggccggagcattgatggattctcagtatgaatcctcaaatcctaattatgccaaaaagaggacatatgaagaaggttgttaacagttagcctgaagtcaataggcaggtaagggcaccaagagtgagcagaggagggactaacttctcatgggaaaggttgccagcccgggcttggaagcaacgtggggagttcagagcgagagttgggaggaggtgaggtggcttcattggagagggtcacaaggaaagtaagatcttcagggaaaagccagcttttggctataacaaagaggtaggaatgttctaggaaaagccaccaaagaaggggcaataccactttttgtctattacactgggcaagatgataaaactattcccagagtcaggcagggtgtggcaagctgggcactctcatatactgttggatgttctgtaaaccagtataatttttctggaaaacaatttaggaatacacacacacacacacacacacacacataacctcacaaggataacctatacaaagttaaaagataagccacagacaggaagaaaataattacagagcacataactgacaagtgattaaaaatcagaacatattaagaacttctaaaggaaaaagacgaaaacccaactgaaaaataagtaaaagatatgaacagagaattcaaagaaaataaaatattgctcaatctctttgataaattgggaaaatgcaaattaaagtgatgagatattatatcatacttagactggaaaatactgagaagcatgggatctccaagtgttagcaaaaataaggggaaatgaacacttatatacattggtggtaaacacataacaactactatagagaacaatctggaattacctagtaaagctaaagaatcatactccccaccacatcacttccattcctaggtagctggcgtacacaaactcttgcacagtcattacaatagtgtctgtaatacacaaaaattagactttaaccatttctcactgccatataatggtgcattatacaccaattaaaccaaatgattttacacatgaaaactttttagaaatgactttgaatgaaaaaaaatcaacctgcaaaaggtttgcctgcaagaatagtatcatgtgtataacattttaaaacacaatactatacattatttatggacacatgtatgtaaaaggataagatatgcacagtaatgaggcttttatcagtatcaggaggaggaaaggactgcagaaagctttagtcatatttgtccaattttttttcctgagcctccaagcatgagtacatatttgtcaaacttaaaaaaaatttatgttaacagatctgaagccaatatggtacagtgttacatttatgaaatttggatgatgggtacatagatttttattatattaacctttcacttttccatatacttttccaagttttaaaagatattgttggccgggcgcagtggctcacgcctgtaatcccagcactttgggaggccaaggcaggcagatcacgaggtcaggagatcaagatcatcctggctaacacggtgaaaccccatgtctactaaaaatacaaaaaaattaggcgggcgtgggggtgggtgcctgtagtcccagctactcgggaggctgaggcaggagaatggcatgaacccaggaagcagagcttgcagtgagccgagatcacgccactgcactccagcctgggcaacagtgtgagactctgtctcaaaaaaaaaaaaaaaaaaaagatattgttaaataatttaagtatattacatagctttcgaaccagtaattccatttttagaaacttctagcaataactatcctgaagttatacaagtaggcacagctatacagatatgtagatatttgccaccacttaccttttttttttttttttttttcccaaagagatggggtctcgctctattgcccagattggagtgcagtggcacaatcacagctcaacatagcctccaactcctgggttcaagtgatcctcccaccttagcctcttgaaaagctgggactacaggcatgtagcaccacaccagctaattttttacttttttctagaaatagcatctcactacgttgcccaggctggtctcaaactcttagcctcaagcaatcctcctgctttggcccacatagctattaataacagaaacaacccaaaagtccatcgtcaggttaactaaataacaattcatccatacaatgtaattctatgcagcattaaacattatagagtagctctgtatgtactgtctgtggaatatatccaagtaatattagtcagaaaagtaggttacaaaatataagtgaaaaatgatggcactttgggggaaaaagcaatatatgttaacacatatgaagaagatcccaaaggacaagatacaccacaaattaacaataattatgctataggggattatgtgacttttactttcttcctaatattttttgttattgtccaaatattcctcaatgagcatgtatttcttttattagaaaaatcaataaagctagttaatttcacgcaaaaagaaaataaggacaatctggtaatagcagatgagttttacttgaaataacggaaaaggtaagcagaaaaagagggagatatcatagacagaagtataacaaaagctctaccgaaacgaagagccaggaggaagagcaaggcttagaggttttcatccaggttgggcattttcagcaacaagaacaaagaaggcaagagtgaggaggacagctgggagagctgtttgtgactgaagagcagagagtacagacagaactacacagttctcaaattccatacaaaattttaatacgtttttcacttcacagattctgaacctgccacaggaccagctcctttggtgagcgaagtgtgtgagcgaaggaaagattcttgggtagaacttcataaagtctgtcataagatcagccccagaggaggagacttttcagatcccatccctcatacacattcagaaggccaaggaaacaccctcaggattgaactatgataaagaaggtaaccaatagcctggacaacacagggagaccccatctctaccgaaaaaaaaaaaaaaaaacattagccaggcatggacagggaggtgcatgcctgtggtccctgctatttgggagtctgaggtaggaggatcacttgagcccaagaggtcgaggctgcagtgagtggtgactgtgccactgtactccagccttggcaatagaacaagacccagtaacaaaaaaaaaaaaaaagggtgtcaaaggagacaaaagcaatgacatcacagtggccttagtttagcctacacaaccagcaactctgtttctctagaattggtgagataatgagaagctgaagaaacagatgggtaggtgcagtggctcatgcctgtaatcccagcacttacggaggccgaggcgggtgggtcacctgaggtcaggagttcgagaccagcctggccaacatggtgaaaccctgtttctactaaaaatacaaaaattagctgggcgtggtggcgcacgcctgtaatcccagctacttgggagactgaggcaggagaatggcttgaacctgggaggtggaggctgcagtgagccgagattgtgccactgcacttcagcctgggtgacaaagtaagactccttctcaaaaaaaaaaaaagaaaagaaacagagtgagaaaaaaagtgggctggtaagccagcgggtaatcataagccgatcttgtgtttaggcaaatacgaaacatctacaacttgaaactaaacagggaagtaatggctctgtggccacctatgatgcagcatggaagttctactggcacgtgtcttctttctggatgtagtaccccctctaacacagccgccacatggtagagtagttgctaagaagccacaggaaggtacaacatctaagatgccacgggtgtccattgaaattaagccatccttttacttttacccctaggcttttggacttggacctcatccaaggagctggctgcctgcactttcacagaccgtcagcttcatccccaggccccaaatcctgaatttgccgtgtcaatgaaaaaccatcatcagcttttctttacattaaaaactgattgtgatcatagcagtttttcctgttttctgggatcactgctgcgaagaggaaaagtcaccagaggataaaatgacacacacgcaaactcttctgtggctgaaattcccctcactcttcctgcctctaaccgaaaaggaggatacagaccaaggagcacttcatgaaggtagtcgcctccctgccctgctgtttttcaccttcaggaagaatcactccctcccaagtaggacctctccctggtcactataatcccatgatttgtaatgtgggcttcattccgcaaaagcccagggctggtgttatctaggagtgatggcagtcatttccagatcatgagcagtcgcacagataaggcaaagggcaactcctgcctagcatgtgtgacccaagagatgacagagaagagaagggaggaatgcactccttcacctggtccctcagcactgagccagcctcccatttgtacatggaaggaaaggccaatacctgatacttaagaaagaattaactgttaggtcagcccccttccctcccaggctagtataaggattaaacaaaataatgttctaatagaagcaagaatacaagttacatggctctaacttggctccaatttctagctggtaggaagtcaatccttttacctgttttccaaagtctatgggtctgcctttagttggaaatacagaatatagaagctattacagaactcggggtcttgaattactgtccaactcttcacaaaattccatctgaaagaagtgatatttaaggaagactgtctaaggggtatgatataaatccatgcccctgcatattttaggctccattttctagcagatcacctgaaagctacacagatgtcattagctcagctcctcacagagtggttttcactaagttgcaatttcatgtaaaacatctgcattttgtctgcagtctctgtgagagctatagaaaaccaagactgcataagcactggttataaaaatagcaaggaaactgtcgctgtagtggtaaaaacaagaaaaaaataaataaataaaacatacttcttggtttaaaaaaagtaaaaattactattatatcattcaatattgccttacatatccatataaatttcattaaaacatgaaactcatttaaataactttgtcctttgagaaagtggtatgttgactgccaaggagaaggccattcacagcaatcacgttaatgaacaggattaggaaggccaggcatggtggctcatgcctgtaatcccagcactttgggaggccaaggcgggaggtctcttgaaaccaggactttgacatcaggctgggcaacatggcaagaacccatctctacaaaaagtttaaaaattagctgggcatggtggtgcacctctggagtcctagctactcaggaggctgaggcggaaggatcacttgagcccaggaggtcgaggcttcaaggctgcagtgatcttgactgcgccactgcactccagcctgggcgacagaccaagacaatgtctcaaagaaaacaaacaaacaaacaacaaaaaaaaacaagattagaacagctgcatgctctccttttcttcggtgctgatgttatttctgtttctatgttattaacatgactatggcctctctttaccagttatctactgtgtgccaagcattgttcccaggtgttaattatgttaattcatttaatactgtaacacaatcctatgaggtaaatgttaccaattctattttaccaaacaggaaaaccaaggcccaagtcatacagctagtaaaaggaggagccacaattcaaaccaggactgatttcaaaattcgcattccttccactatgccatggaaagtacagtagggtgtttttatgtcaactgcagccagacacatcaattttctcctctgagaggacaggatataaatctgaagaaacaatgtatatgaaaatatgctctatgctataaggcaagatttatatgtaagtaagtatcatcatcctcaaggagaagatgcataaagcagagctgacagttttctttttcatttttttttttaagagacagggacacgtttcccagcctaggctggacttgaactcctgggccaagcgatcctcccgcctcagcctgctgagtagctgggactacaggcacatgccatcatgccaggccagaactggcatttctgctgcacacacaccagtaaactcagcaggaagtgaactctaaacatagcctaagaggagaacttttctctcaacactaaaactcataaaaacacgtaagcaagtgtgtcggtcagtcactcccttaaacacaggtgtctggcaagatagtgagaaatcatcccacgtctaacgtccatgggcacagactcctgtttgcttcagaatccaggagatgctggcatttggccaggtaggccttcttttctctcaactcccttttaatctcatctccttcagtgatgatcattctcaaagaattatttcaagagacactatctttgagaagaagaattatttcaagttttaatttctagctcatctacaaatccacgactttttgaaatcaaagctctccaaaactctgacacctacaatgtgcttctttcctctaagtttgatggctattacctaggagacatgcatgccttccctggtagtttagagacaaagtttggaatatgatgtgctcagaaaaggggtcactctacctttagtcctgggcatcaagggctttctagatgtttaagagggaagtggtcgccagcagcaagaaaatgctggggtgggttctctggaccactgcttcactcagggacggccaccccttctctactcaacccatccaaaccctgtaagtgaagtgtaaagaatgcaacacagatcttcacaaagactacctaccaaaacaaaccccaaccagaaaagcattggggttactatgcaaagggatccctcagggataaaacaggaagaggggctcactgcatttcctctcaagggctcctgcttcaaccccacctatgtatcacaattcttttcctcttcagtattaaccccctacctcattaatttcctccactccaaccagtgggcagcaatgtccaacagagcacaatacatttaaaactgtttagaatggttgtcttgcacttttctcaccttgtcttcttccaccactggctaagctttcaaccgattccacagtgccccagctctgcagtaaagcaactaccccacatcttcaaactcttcacagaattgtgcaccatctcctgccctcacacacaccaggctctccctgagggcgctctctccaccctggcaacttcaatagctatgtggatggatccactcaaaactcttagctcacaactgattccctgacatcaattccacttccacttgagtcacccacacttttgcacaaaccctgaacctggcgtacccatctcaaaaccttgccctctactgtctgaccacaatttcccttcctgtctatcttttgaccattcactacctgacagctgctctctgaacttggccaggcctctgttcccttaggcctttttcctagagtatatcagccacctcttggcctttccttctgccaatccaggctgaaatccatgattcatcacaaatggatccatctcaaatccacagctcctttctctttccactgtacctacctaaaaagctctaactatggtattctccattcctttgtaagcacacctaaaaattgctagtcagataccacacatccaatacacttctgaaaggccttttggagatacattctgaagcatttatggaggaaatggtatgatgcctggagtttgcttcacaaaattcagtggtaaaaaaggaagagtactggacaagaatagaaataaaacaagctagttcatgtgttaatagtcatagttattagttaatagttacagataatggttgaagctggatggtggacacagcagtagtcatctattctctctactttggttatgcttggtattttccataacaaaaagtttaacaataaaacaacttacgtgcaagattaatggggaacaatgccaaaggtcacacacagattacctgctagtcacaaaatgaaaactataatttcacgatggagaaatttagctgatcctaccttaaccagtaatcaaacttagcatcaataataatgggccagccaaacatcatgtgcctctgatctgctgcatcattcataaagggttgttttctccctaaaatgcttaacctaaatctaatcaggtctctagatctaagttacagtttatagaatacacagggcagagaggaagaacctgaacaataccccaaagaaacaatcagacaaatccataatgtgaaaagtgaattcatgttaagaaataagaagtgtctaaaactgaactcccagcctgggcaacacaacaagagccccatctctacaaaaaataaaaaaataaaaaaatagcagatttagcagagtgtggtggcacatgcctgtagtcccagctactcaggaggctgaggcccccaccatctaactaaaactatccaagaagaccccgagcaacaaccccagaaccaggcaagtattgtggttttaagccactatgttttggggtggtctggtaggcaggacactggtaaatccagcctttcaagagccagccctgagacctgtctctggagtcttatcttgacactcctcaatctaccctgccaaggacaacaaacacgaccaactgggacttccctgcacactctacacttacagcttcactcctgtctttgtgcatgcaaatccttctacctggaatgcccctccctgccctgtctccttataaaggaactatgcctccttcaaaatctgtaccagcaccatttcctctgtgaaaccatgccctccttttccccactctcctcccaccagtaactcaattaatcctttcctcccagtgaaacatctagggtggcataaactgcaatgcagtatactggcttttcatatgtcttgtccattaaactattaagttccaagaaggtaagtgctatatgtctgtgcgctggtcctgcaggggcctaacgaatgtatgctgattggaagtggtttctcctgcttccttacttagcctatttctactaaaaacatttctgggccaggcacagtggctcacacctgtaatcccagcactttgggaggctgaggtaagaggatcacttgagcccaagagttcgagaccaacctcggcaacacggcaaggccccatctctacaaaatttttaaaaattagccaagcatggtggttcgtgcccatgatctcagcttctccagaggctgcagtgggaggatcacttgagtccaggaggtagaggctgcagtgaggtgtgatagcatcactgcactccagcccgtgcaacagagcaaagaaagagagcagtctcaaagaaaaattctgtttaagcccctggctgatggagcagaaatgatgctcgctaaatcctgcttttctcggtctcctaaactctaacttttcttttctgagttcgcaagttcacaacccttggaaaaacaaccccaggttgatccagcactaaaagctgccttttaaaatacagttaggtgggacctgactagcttagtgtctgggacataagtaggtactaaataaacattatttcttttccttctctcacttcaaaaaccttcctgaatctgttcccaaagcagctccatttcctcacacctttcaagctgctcttctccaaaagccacaccctttctgggtcttaatacctgcttagactttggcctactgcctctcctcagtaccagctgcccacctgctgccacctcagccagggtgagctcatcaaagcaggtaaaatttttaagggagaagcttctacgtcacaagatctaggtccagcatgtcaatacaattgcacataggaagcactggaaagttttgcaaaggggattcatgcaactatccccaaacattaacaaaagaaatctggttgtatcgtatataggataagagaaaacaaacaaaaaacaggattaggaatcagaagacttgggtgaaatttttaatctgcctctctcactaaaggctttttttttgtaaacttaatcagaaatattcttttaagccaggcacagtggctcacaccttgtaatcccagcaatttgggaggccgaggcaggcggatcgctcaaggtcaggagttcaagaccagcctgggcaactagtgaaaccccatctctactaaaaatacaaaaaattagccgggtatggtggcatgtgcctgtagtcccacctacttgggaggctgaggcatgagaatcatttgaacctgggaggaggaggttgcatgagctgagatcatgccactgcactccagcctgggctacagagcaagaccctatctcaaaaaaaaaaaggaatatttctttaatgtcacagaaaatgtttttaattgttatggtacatccttaagtgaaaagaagttcacaaatttttagtaaagaaaaaatttaatagaaaaaaaggttatcttaggttttcttatcaacaaaatgtaattcctgctgggcatggtggctcatgcctgtaatcccagcactttgggaggccaaggcgcgtggatcacctgaggtcaaggagttcaagaccagcctggcaaacatggtgaaaccccgtctctacaaaaatacaaaaattagctgggcatgatggtgggtgcctgtaatcccagctacttgggaggctgaggcaggagaattgcttgaatccgggaggcagaggttgcagtaagctgagatcgtaccattgcactccagcctgggcaacagagtgagacgctatctcacacacacacacacaaataaagaaaatttagttactacttctctccttacagcaaaattaattacagtttaaatgtaaaaactggaaccaagaaaacactaaaagaaaacatgaataaatttttttttgtgattctgacaagtgaagaagatttttccaagtatgacagaaaattcaactccacagccgagaagcgagatgaggggaagcaccttgaaggaaaatatttgcctaaataaaaatgtaaaacatgtgaaaggcaaataattagcataaacaaagtcaaaaaaaatttttattgggggaaaaattatcagcaacacatatggcaaagagtcctaatgccgtatgtatgtaaaagctctcacaagtctacaagataaaatagtgaccaaagagaaaaattaacaatgtatttgagcagaaaatttacaaaggaataaaatcaactaccagaaagataaaaagatgctaatttcattaataactgaagacatcctaaataaagtaacaataagaaatcctttttcacctatcagattggcgaagagtaaaaaaatgtataacacctgtgttgggccagggcgcagtggaaagaggcacctccataccctgctgatgagaagtacactgatgcaacctctttggaaggcagtttggcaatttaacatttataatgagcacaccctttgatcagcaaatctttccttctaggaattctgcctaaggaaataaaatacaagtactaggacacatgggcaaagacagctggatactgctgttcattacagtactgcatataacaggaacaactgagaaacaattcaattgtccgtcaaaaggggcttggttaaataaattatgatacatccctctgaagaaatgcaatgctgctccttaaaagcacatactgaggtagaaaaatatcctaggtaaattacaagtgatatgtttttcagtacagtataatcttttctttccattttttaattgcagtaaagtatataaaattccccatttaaaagtgtacaattcagtggcattaactatgttcacaatgttgtgcaaccattaccactatttcccaaacttctccaaacagtaactccgcaatgattaagcaataactccccattctcccctctccccaagctcctggtttacctctaatctattttcctgtctctatgaatttgccttttctagatattttatataagcagaatcacaaaatatttgtgcttttatatacggcttatttcagttagggcagcattttcaaggtttatctacattgtagtatgcatcagaacttccttcctttcacagctgaagaatagtccacagtctgtattactgtgtttatacattttctttgcacattgtttgtacattttgtttattcgtcagtcagtgaacatttgggttgtttccaccttctcgctgctgtgaataatgctgcaatgaacactggcatgcaagaatctgagtccttgttttcaattattttgggcatatacctaggagtggaattgctgggtcatatggcaatttggggctttttggggaataatcaaactttcccacagcagctgcaccgctaacactcccactaacaatgtatgaggattctaacttctctacattctcaccaacacttcttactttccatttttttaaattaagagcataaacttttcgtgtaaaactaaatgtacataaaaatgcatcatttaaagaatctttatggctcaaggatgttagtttaaatatataaataaaaaatataaataaataaaaaacccagtgctacccaactgttaacaataactatttttctggggcatgggtttatagaagatgctcatattctgccttacgtattccccattttgcaaaagtttttagaacacctggtgttgcttttgttattttaaaaaatgtcttaaacaaaagttagccagatagacggtttgatgcctgcctgctaatgtgaaacacagtttcagtgttacatacacagcaaggccctaaatgggcagaggtgagaagacctgagtcccagtccccactctgccaccctgagcactctgtattctcacctctcaactcccaggcacctaggactgaatccaagttcccagtgagcatccgcaaaatagacgacagctgtgtggacccacccacgtggtccttccaccccggggacagcactgaggctacaggagccccaggtgggttgtctcaggctatgtatgggtagccgtctcccttcctacattgaaacagaattctacagttgtactgaactaatgaaggaaggtaagaaaaggagagctcggggaaaacctgcgagtcatggactatgaaggaaaatgaaggccttccccgcaaagaaagaagcaagcccagaaaagaattcaagaaatgatgatgccaaggaggacagggcagctgacattgactaatgcaagtgtctcacctgaagccacaggtgctgaagtagacagcaaagggcagtgcctggagccacactgctctgtgggaaccatcccaaggtcacctgctcaggcagcaacaaggagaaaacccagcctctgtgggaagaggcactgaggcctggggaagtgaaagtcaagtgaaatccttcccctcttccaggtgttctcagcctttcggctgccaactgtggactttgcccttgaaattcaactcctggcctaaagagataatctcccaggcatgtcctgtgtaaatttggctaatcaacagaacacattctgtgcagcccctgctggctgtccctgaaacagccctgccagccagtagtagtgctgactggcggggggaagcttttcctggcagaaatgccaccaatcctaatgaaatcaagtgcccaggatgggcattttccaaaaatcagacaagcatctgtttaaagacgagcacatacctggaaatctcatccagaagtgatacggatttggtgagaagagtcattgagagcatggacctttaccaggctttgttgatgttttagagtaagccacctaagaacatctaaagtaaagctttgtagacatgaaattctgggtcagtaaaagaaagcaagccaattaacatctggccctcatacccttattggcatctcagctgccaagcctcttaagcagtggttctcaaagtggggttcccagccaacagtagcagcatcacttccaaacttgttaaaaatgcaaatttttactaaaaaatttctactaaattggttaacaagctctccaggtgagtttggtgcacagtcaagtctgaaaaccactgctctacgggctctagaaagctctgcaatctggagttctgatcccgcccaccctgagacttcccttactttctgctctaaatgaattttgagggactggaatatcatcctccagttacagccaataaaataggcaagtttcctcccactccatttccatcttctacatggtctcctaggtttcttttctacaaatcatattcaaatgtgtttccttcctgcttcctggggaaagtgattccccgctttctggatggttcaatcccttaaagatctgacctcagccagtctttccagcctcatcttccaacccatctgtgtgtccctgctcatggcagatgaccattcaatgtctgctcattgtgaatcagtgatgaagaccatctgaacaacaccctgtaaaggaacctttcccaactacattatctttccttcagaagcaagtctgttactgaaacagactgggaaggggagacaggaaagcaaaatccagtgacttaccaaagaaattcctctgttttctagcaatctatgctaaatctgaaattcagtctcaccctgctctgcccttcacaaactattccatctaagcaggctgattgggctgaccacagatctcatgaacaccaaggaatgagagtttataaacactgcatacattttcatttcagaatcccgggccttcactactgatagaatccaaacaggatcaaacctttaaaaaaaaagaagtatggaccggacacagtggctcacgcctgtaatcccagcactttgggaggccaaggtgggcagatcacctgaggtcaggagttcaagaccagcctggccaacatggtgaaaccctctctacaaaaatacaaaaattagccaagcatggtggcgtgtgcctgtaatcccagctacatgggaggctgaggcaggagaatggctttaaccaggcaggcaacggttgcagtgagccaagaccatgccactgcactccagcttgggtgacagagaatccatctcgaaaaagaaaaagaagtatcaacccatagaaactagtcaatgttcaatttccaagaagtgaaatttgtggcctgatacatttcttttctcaaacatttccaacaaacttgaagactctagaagagatctgtacgctaggaaatcagggtttatttacaaacactagtttactgacaaattacttactttttccaaaagtaaattccatcttcttatacaatagggggaattgcaatctaagacatctaactacttatggagcgttaaggagaaaggccatttttttcctgcccagagggagagatgtaagtcaggttaactgcttccaagtcttgccacagccccaccctccccagttgtttatatggactcgcattctcagtatttaaccaggtacccctttcagagaaagctaaaaaaaactcattcaattctgcaaacattcaaaatgtgaccataaataacacatagtgatacaaaggaaaaaactcattagatgttctagataaccaaagaagagctgcatttgatataccaaccagagtggaagtgtggcaagaacacatgcttggaatcaaacagccttagatttagattttaagcaagttagctactccacatccctgcagatgttacaacatcaacaaattaactcacagatcattgtaaggatttactaaaacaatgaaataaaaatgcctagtataacacaatgcttagaacagagtaaacattacactaatgtcttaccgctaacctaaaatctgcagaaaatttaaaaatacatagtgcttgatcccaagaagtatgcagactatattaattcgacttccttagctaagcaggtatgtctatgcccacttcagatcccttctgtttcctcatattcttatccccttcccccttcttcccccttcttcctccttcttcccctttcttccccttcttccctcttctttcttcccccttcttcccacttccctcttcccccttccccctttccccctttcctcttctcttctcttctctgagacagagtcttgctctgtctcttctcttctattcttttctctgagaaagagtcttgctctgttgcccaggctggagtgccatgatcatagctcactgaagcttcaaactcttgggttccagcgatcctcccgcttcagcctcccaaagtgtgggggttacaggcatgagccaccatgcccagcaccctactctttttcctgattcttctccatcagattcaatgttcctctctctccctctcaaatttccataccttatcccaagttgtgccaccatcctccaccccgacacccccttgctccctacattctaacaatgatgacttcctaggtgtcctttctgcatgtcaagctctttcctacctcaggagctttgacagctgttcccttttccagaaaggaactttccccaaatctgcacattaacggcttcttctcatccttgagctcacagttcaaacgtcattctcagaggccttctctaacctctcaggtccctgttactctctcttttacatcaccattatatccttccgagctcacagcactatcttgatctcatctattgatttgtttacttgtttactgaaatgcttccccactcactacacgtcaagctccatgacaacaaggacttcaatgtcttagttatctctacctcctcggcatacagaacaaaacctagaacagaaggaatgctccataaatatttattggatgaataaatacattcagtttccgaagcaagagaggcagagttagattccccctcactccttcgctttctctaactggtgacagtagaagatggaatcccagggaaagattgtaaattaaaaagagaacagactgaggattaacttttggggaacaccaaaaaataaaagccatcccaacccccccaatgacaaaacattaagggctatcagggacccaggaggatggcacaggtgttgcagtctccaccgcctttttttgtttctacagctttccagaagaagctcagcttcttcctgcaaggccatgtagacatctggccttcggtgtttttcagatgaaaagaagtctggatatcactgctttgaaaacccatctgggcacataagcagaataggcacctacatctaaatggagggaaaaaaaacccacctgggtttaccaaacagttgtgggtcctgcaactggagggggtaggaaagaaaataaaaaggcttttctatttccacttaatgagatttaaataaaacaacaatttccggttgctttttttttttttttttagacggagtttcactcttgttgcccaggctggagtgaaacagcacaatctcagctcactgcaaactccgcctcccaggttcaagtaattctcctgtctcagcctcccaagtagctgggattacaggcaccggccaccacacccggctaattttgtatttagagacaaggtttcaccatgttggccaggctggtcttgaactcctgacctcaagtaatccacccacttcagcctcctaaagtgctgggattacaggcctgagccattgcaccctgccctggttgctttctttttaacctggatccctgccacttccccctgggtacttattagagttcagttgacaaaaccaatagcccttcttacctccaatatcttcacaactggctctcccagcacagccaagccaagagcaaaccctgagcatcagtgatgactcaaatgcagagaggcagggactcggaaaggacagtgctacctgttccatttatgtttcaacccaaagggataagtcaatcaggaggttggagagaggcagagaacataagaaacttcagtattttctttcctttctagattcaaaagcctcaattctcagaacataccagccagagtccaagccacagactgcaaaccaaggtcactgccattgccaagcttgtctcacatgtcctagctattttcttctcacactcatgtaccatcctcctttttctcttttttttttttttttttttttaagagacagtgtcttgctatgttgctcaggctggagtgcagtgtgtattcacaggtgtgatcattgcgcaggacagcctcaaactcatgggctcaagcagtcctcctgcctcagcttcctaagcagatgggactacaggtgcccaaaaccagagcacactcctttatagttgctggggtcattcaagttccttaatttcctttccctactggcattcctttttgctaagtggcaaagtatatacacacaagtcagacctttttgtcctaaggtctttgcaaatgagtacaaagttccacgtgtagtgtctacagtcctcagtcttcaccatgtatttattattattattattattattattattattattattattattattattttagagacaggatcttgctctgtcacccaggctagagtgcagtggcacaatcatagctcactataaccctgaactccagggctcaagcaatcattccacctcagcctcccaagtagctgggactacaggcatgtgttaccatgcttggttaatttcatttattttgtagagatgggggtctcattatgttgcccaggctggtttcaaactcctggcctcaaacaatcctcctgccctggcctcccaaagtgttaggattataagtgtgagccattgcattgtgtccggcctttaccatcttttaattactccatcagaacacatattaggtcacaaattgctaataaactaaatgggagggagattccagcataactctgcaaggaaacttacctccactaaggagtacggggcacagttttgggagctctatgcaccatcgaggctaagcttctcctggttctacaaggagctactgtcgaatctgagcccctgcctgtggaagcctgcagaagtaaaaaagctgaagaacaggatgtttgaccatcatctagagtttggtcttctaaagcaaaaataaccttacattgtaaacaccctcactcaaagagaaaatttgtgaagcctctactcttaggaactccctattctgccctaggcctgtctgggctcagcaggcccataaattggcactgttgatatgacctttccaggctgtatttcaacaagagataacaacaaagctcagagctttggtagcactcaaagaagatttgagggacttaaaacacattgctaaatttggcagcaaaagttcctgttccctgaagttgcaaaagaaaatctctttataatttacacttgtagataaggagctattcattctctttagaaacagattagaacctcctcatcccaatccaccactcctctgaaagaggagtgagactgctggggcaagtctcacctggggctgggatcaggctatctcttgggaagatgaagtaccaggaacttaccttgatgcctcttactgccttagccacaaatgcccagagacatttgccacttcactatctagagccgtctatctccctcaccctcccatcagccttcccaattcccattctgctctttgacactgggtctgccatgtccctatccctgttgttcatacaacacatattactcctcagagaggggcccgctcagcctagaggctcttttgattcagccagactccccttctggtttataatttctttacaaaagcaaggtacaggagctccgatctatatgctgactgggggacgcttatcactgctctgctgataccgtctgcccaagacacagaagaaggggatagggccttgcatttctcagcagaacaaacccaacagacaagccacaaagaaataaacacagctgcctggcgtggtggctcacgcctataatcctagcactttgggaggccgaggcagatggaatgcctgagctcaggagttcgagaccagcctgagtaacatggtgaaaccccgtctctactaaaatacaaaaaattagctgggcatggcagcatgcacctataatctcagctactcggtaggctgagacaggagaattacttgaatccggaaggtagaggttgcagtgagccgagatcgtgccatttcactccagcctaggtgacagggcaagactttgtctcaaaaaaaaaaaaaaaagaaagaaagaaacaaacaaacactcctgaggctgggtgcagtggctcacgtctgtaatcccaacaccttggaaagccgaggtgggcggatcacttgagctcagttcgagaccagcctgggcaacatgaagaaaccccatctctataaaaaaaattataaaaatcagccaggtgtggtgcacatttgttactccagaggctgaggtgggaggatcgcttgagccagggaggcagaagttgcagtgagccaatatcgcaccactgcactctagcctgtgtgacacagtaaggccctctcttggggaaaaaaaaaaaaaaaaaaaaaagggccgggtgcagtggctcacacctataatcccagcactttgggaggcctaggcaggtgtatcacctgagatcaggagttcaagaccagcgtggctaatatggcgaaaccccatcgatactaaaaatacaaaaattagctgggtgtggtggtacacacctgtagtcccagctacttggaaggctgaggcaggagaatcacttgaacccaggagatggaagttgcagtgagccgagatcgtgccactgcactccagcctgggcgacagtgagactctgtctggaaaaaaaaaaaaggaactaaacactacttggtttacaagagaataataaacaaaacaataactgcaaacattttgttcagcaaggaggcaggaagtactattctaggcactttacatttggcatttaggctttgttacagccccatgagataatgctaccactgcctcaattttacggaagaggaaccagggcacggacaagtaacttgtccaaggttacagagctattaggtggcagaggcagaatttgaacccaatctgaccccagagcccaggctctaaacattactctcctattggatggctcttcccctaagacacagatttgcgtctgggcactaactggctcaccctaaactctaaaggagaggggattgctcagaaaacactggcatttttcgccactgagaaaaggaaacagtgatggaaatatttattcaaagacctggtctaaggctacagagccaaacaaataagtaccccaaacatctgttaaccaaaattttcccagggcaccaagagaaacctaccttcttacttactaaaggctgaggcctccttgtactgccctacgcattggagaacaagcttccagcctccgagttctgagaaccaagtcaaaatgcttcctagaatctggttgatggggttaaagaaaagttactcaaatattttttaagcaccaactatatatgttagccatttggggaaataaaaagtataaaatattatacttgatttcatacaacttcaaggaatctagttgaaaacacaagatatacacatttgaaaagtcaagtcagggccaggtgtggtggctcacatctgtactcccagcactttggaaggccaaggcaagcagatcacttgagggcaggagttggccaccagcctggccaacatggtgaaaccccgtctctactaaaaatacaaaaattagccaggtgtggtggcgcacatctgtaatcccagctactggggaggctgaggcaggagaatcgctagaacccgggaggtggaggctgcagtgagccaagatcatgccactgcactccagcctgggcgaccgagcgagactctgtctcaaaaaaaatgtcaagtcaggatgtcaatgagaacactgaatccatgccttctactttctggaagaggagactgaaccctagagaagtcaagttacttccccaagatcacccagcaaattagagacagaaccagaactaacatccagacctgctgactacctggctgggactttctaccgctatatgtaggcagagaaattcacaggaaggatggattattaacaacagcagcagctaacatttattgagagcatatttgtgtctacaactaagtcgagtgccttacataaattaacacattgaaaccttacaataaccctttgaggtgggtaatattatcactcccaacttacagatgaaaacagaggtttacagagatgaactcaccagaggtccacagatagaggaaaaaccagactatggaccctcagagctggctgcaaagcctattctatgctctaagctgcatctggaagggtacaagggcagtatttgtggaagcaggggtaaggagggctgaggcagaggccggggtctggagcactgagagcagcttgtgaagggcctccaataccacactgagaaagacctcaggggctccacctaggctggccagcaggaaaggggcaggcgagaagcagttctggatggacgggtctccccgtctgtgaggagtgagcatcccacagcaggaggaaagagctgaacctgtgaagctgggttgacaaggactacctcagactcaggacttctggcctctccagtgtgggcggctgccgtgtcctcaaaatctcattggcccctactccttcctcttaaaggacactctcaagtaccttcctaacgtgtaggccaggtctgaaagggcagtcctccttggctgctggtgactttccaaagcaattgtctttctctccctaccttgtccatggctccctgtgccctttctttgatcattctgcctgatgcagcagccataagacatggggagctgtctgtcaagtggcaggaactgaacacaagcagctttgagaggtggggaggaaatcctgtgttattaggaaatcttgtattattacacacccaggactgcacagaccccagaccagactacctggggtcttgacagaaagatgaacgagatgcaaaatagcagctacttctttttttttttttttgagacgaagtcttgctctgtcgcccaggctggagtgcagtggtgcgatctcagctcactgcaacctccgcctcccaggttcaagctgttctcctacctcagcctcccgagtagctgggattactgatacacaccactatgcccggccagtttttgtatttttagtagagacagggttttaccatattggccaggctggtctcaaacaccgacctcaagtgatccacccacctcggcctcccaaagcgctgggattacagacgtgagccactgcgcccaaccagcagctacttctaaaagaagaatctggtttgttcccagcgtagtaacatcaacctgtttgagagacaccagcccactctcttcaaaatgctgctgtaagttgataataatatactggaaagcattggacatttactatgtaccaggcactggcctatttacaggtatcatttcatttaatccttaccacaactctatcaagtcaagtactattacatccattctacagatgcctcaaagaaggctgatgcacagagagattaaataacctgcccaaggtcacacagcaaggtcaggctctaaagctaggcctctaagacccctgagctatagctgttcatcactgcagtgcactgcaatgcatgtcagatactcatattaaatgcaaatggttccatcagaattgctctaaggcagcaccacgcactcactgagtacctaagagtcactgagagttgaacaaacacaccacaggctagttcattttaaaaccatctacaatactcagttgtcagaactccataaggtagcctgtgttccaagtcacaagcacaccaaaagtcagttcctcgaacaaaactagagttttaaaaatagctgacttgatagtttttttccaactttcccatttcccctttcctatgactccctcccacatacaccatcctttgacactgtcaagagaagcttcaacacaggcctagaatcctcaccctcctacttccagtccttcagttggctctcttccttcattcgaatcgtgcttgaaatcagtctgttggaccctcctcctttttcccagcctaagagcatgagatggtcattaaccctaccatcaaaactcagaactgcagcaggtctatgctgcttctctcttaatcacacagacagagtgggggagagaggggaagaaataactacaacacaacgtctattataacatgacatagatgggagtaaggcccatacttgatacttctgcgttcctccccagctcttggcccagacactccgtattcactgactaaatgggtgaacagaccaatactgcatagatgggcaccagagacacctctgagccaagaacaaacaaacagaggtgttaaccctaatgccagccacccctaccccctccagtgcttctgagggcctgcacgacactgtcaccctgagctccctgggggcagtctggccttctgctaaattgtgtaggcctccgaggtcagcccttctctcgattaccacctgctgctcctgagaactgcctccgcccagggccccttgcccagtgcctcactcctgcttccttccagtagtcttcctcctgcctcagatcttgtctcccgtaaccctcagtttatctcattttttcccagttccaaataatcctccatccactatgtgatttccaacagtccatctccagctcacacacaacccctttggtgatgacaggtcacacagaggaagagtctggagctttgagaaactgtggtggtttcgtgacaagcctgtaggaataggtctgctttggttaagaaggcttcatacgctaactgcatataattcactcttttataaggacagtgaaatctaacattcaggcagttttagatgagaagagtatagtgatagtttcaacaccctccccaacaacagtacattcatgacatcagagccaaaaaaataagagaaggggtctttggagaaattcttcaataaggtaatctagactcatttaacaccctcctctcccttcaaaacacacacacacacacacacacacacacacacacccaggagagctttctggggcctatggctagaaatagagagctcaggtgtttctatcagcacaatattacgtggcatattcctctaagacagatgcacccagtagttcctccgacccacctactgagacagacacacatagcacctcccctccaggatgaaacaaatgcctagcctccccagcccctgcctccccaggagaaggcacacactaatgcaagttttcccataggctttaaagacaaatctctgcagactatgccagatggtcttttttttttttctttttcttttttcgctctatgccctcctggccccttctccactttccatggtccctccaactcaaagaactcaattatctgcctgcagatttccccttcccctcctcgcagcctgccctaaacacaccctcctcccaagcccatgcagaggcacagaaggaaggccaagccagggctcggaagggctgctgccaggcctcctccagcctcaactatgtgttccccgggcttggctgcctcggccgactctcttaggcccaacgatggaaatggggacgtttccagggcaatgacagttaacagctaagaggagtgacaggaaggaagatgtattcttcaatccttcagtcccaactgccccacagggaggtgcttcagaaggcccaggcctcagagcctcccatctccctgaggtgccaggtggacctcccgtaatgcagttcttagaatcagatgcggtggggagtggggcacagcctctcttaggtctaggctaccagtggggccatgatacttggattgccctcctgaatctgtacaccccgcccttcattccagggaaagaggctgaaccagcagaaccaagggtgtccttggcctgttctccagtgtatttcaaagtttcatcttcccggggtgactgatatctaatttgagagagagagagcccaaggggagaaggtacaggaagcggagtagaaggaggaaagagggagtgagaacaggaatgttactttttaatccttaaggaacatagacagatccaatttgtgactcagctctgggaagccggactgatgggagtcggggaacagctgcagccccaatctaagctgtgggcagcttctccttcaggccttagaggctgttgtgacatgactcaactagaaggggagctgcttgttttgtttcatttttttaatctgcctactatgggtctgctcaagggcttcttcccagacaccactccgggatatggctggcaggtcttccccatcctacagtaaagctggggctgtgggtgacgcgctctagtatgccatacgccctttcgactcaatgaggacagacctgggactctccttgcctggagtctcccttcccctgctcttccattccttggcacagtcccatggcatatcaagaatctctgcccttggaattcccacttccttgtttctttttctttccccataagctgtggccttatgagttcctgaaagacctgcccagcccccaagaagcctttcggagcaataacactttctcccagttagaaccctgccttctaaacccagaatgaaggagaaagacccctttgcccactgcagagtgtgcccagcaggacccagcaggatgagggaaccaggcctggcctcttttccagctgctaaagtttatggtgccacaactctacaggcagctgtgggacacaggaaaagcgacgggtcttttggaatacctctcctctatactatatataaacacatgagtcaggtgaccaaggaaagcttcctccctgcaggatcgtctatgaggctccagttttatggcaaacatcactcttatgaaacgacccaacccaaggaaagcaacatttgtttccttaaacatcctgaagaagtcttttcagatttttctcatgtttacttataaatgcagaaaggaagaaggcactttataaaatgagagaaccagaacagagaggcaaagtgactttccagagagagttgggtcattcctcaagcttcaattcacaacacggttcgttagataggacgtgacttgtttcaaactactttcatggaagttatcccactggctcctcccaacagtcctgtgaagttgttcttattacctccatctcacaggtaagaatctgaagctcctattagttaagatacttgcccgtggccgccctatgggaacagaatctagccgtcgactcaagtctagcaacccaaatccattattctttctgctataccaacagaaggagcagcagctcctgaaactgggtctctgctagccctcttcacagatgtggggatggtaaaattgaagagctccaactacacacacaagtagaaaagaaggctgaggttctggatttacactgccaactgaaggggccactggctcagtgttatgccacatccctccagcaaaatgtaggtttcaactaagcaaaggatccctggagtgtatgtagcaagaggaataacttcagaagtggaccgtctgaggtccagggccatggagttcacccttgtggaccctcaggccacaaccacgatgtatacatgtactcattttagggagccggaactggggacatggccagtgcttgcattggcaagctgatccgaagttaatcagaatgccccctcattgtttgccagaatacaaaagacattctgttcagaaagttcaagaagaaaaactgaagaaccaggacagcagctgttccctcatcccacagagaaaccaaaggcatttgcaaagttccctgaggccaagaagtgaatttaagacataacatggctcaagtggaagcacaacccctgatgggtctccgttgcaggaagtgtttgctgcattcatcctcctcataatattactgacaaccccactaccctatcacctataaaactgcctttctgggagggtctcctttccaaggccacacagctcaccatgtaccactcctctaggtcagaacaagttttaccaaaacttaggacaatcagtgtaggagtgcacagcgtggacactgcgtgccctgagatttggtcaaaatgtaaccaaaggaatccacccggcacaactacagtgcctcatgttccccagctcttagcagctgctgctgagagctcactctgggacatctggatgagaaacctgtttgcaggccccccaaccccaagccagccccctcctccacctcttaggaaagtctgtgatcgaccttttgatgtgggaggacagcttgattcttaccaagctgcctggaagagagagagtgcaaaaccccagctcaggcatccctgtgacagtccctctgtcctaataaatgctctagagggacttggaactcaccacaggctcctggctgagcttaattagccttttttttttttttttttccattacaggtcagacatagcagcaccaagagacaaaacagacagtgttcactaggacgaacaagcggctcaaaaggcactggagtttccctgtaagaactacaaacaccacgggagtgatgttaactcagatttttccatataaaagattcttcctgtaaaaatatcctgtgcctttgtgctaaataaaagtaaaatgatgctttttagagtgaagtctaaacacctcagattcagcaagagtgagatcagctagatttgcaaagtcaagaaaattggctgtttccctcctccttaagctaatagaatccaactgttggagcatgacatcattcctgagccccaaaccccgagcagagactacagacactcgcctgactcccagaaaacagccggagagaagggccaggaaaggaggccaaatgatcccagcccggagctgcccttacctgaaagtcccgctgctttcctgcccactccattctcacaccgcagccggctagggagcccagggcccccaaatccactggcttaagctccgatacctgctgcgagcttcccacagctccttcctctgacctttcgtggcgctcctcgcagccaagtgagcagagcactgctagccggccaggccggttgtcatggagaccctgtcctcgctaggcgggcgcgcgcacagcggcgcgctcttggcctagcgcgtgcacaagggcgctctctttttctttctttctcactgtctctctctctctctctctctctctctctctctcagttctgggaggcttccatgaaacagcactgtcttttgatcagctcggtttttgcatgcattccactcctcctacctcccttccagtccaacaggggctctgaactgctcctgggaacttgcttgaacagctcagaggggagaagggagaagacagtgagtggacttgttttcttcccctccagtgtctcattttttataacttggaagaatccctgccaggggggagggagctagctgaagcgcttgaaggggacccagcttcctctgggtcctggagctcgggtaggagggaccctgatgcgctgccttgacttgtttgtgcacttgggatttttccgggcagcagttggggcggaaatgcactcacatcccaggagctcgcctggactggcctctctgcttaccttgctgcctgtccaggttgtggcgatggctttaaccagtgcagggactcatggtactagtggtggcgcctaagcagtctctcatcttcctgaaatggagagcaaagacaactcggtcaggaccaggaagaatcctgggcaagtcgagagtcacaacccagacgacaaacctgatacaaatacagccttgtctctctgccctgctaaggatctgcagctaaggtgcaggcttagtgggagctgctgtcacagtcggtaataatattgctcctgtcagaaaatgagcacagtccctgggacacggcagaccccctaagtttagtcccatccccatccccatcctgtcccttcctctcccccctacccagcatacatttctgctttgtaacattctttttacatgtatcattttgtttgatcctcataaccttttgaaatacactgcacagatatttttatgaccattttttcaagtttatttattattcttcttaaatttcttttagagacaggatcttgctccattgcccaagctggaatgcattggtgcaatcatagctcactacatcatcaaactcctgggctcaaacaaccctcctgcctcagcctctgaagtagctgggactacaggcatgcaccaccacgcctggctacttttttaatttttatttttatagagacagggtctcactatgttgcccaggctggttttgaactcctggcttcacgcaatcctcctgcctcagcctctcaaagtgctgggattacaggcgtgagccagcatactggccttatgaccattttatagatggaaaaactgagactcagagagattaaacatttgatctgcacttatacagttaggcagtcaaagaactaagagatcagccaagttcgccctagtccagcacactttcaactaaagtatattgccacctgatttcaaaaactgtcaactttttgataactggttatgagataacgctgggctcccaagggaaggtggagaatccttgtaagttgtggcgagataggctgactaccatcctttcagcctaaagaccttaagacagcatctctaagatgtaaaacgtcctgatgcacagctcggagaaaaagccctaccctacagctatatgtgaccttgcacttttctaaacgactctcaaaatcttggctcgtctgttcaacatgacaggtctgaaagttaggattggcattattatactaatttaacagattttttttttttaattctacaacagaagtaaaattacttgccccaggtcatggaaccaggaaataaaatctagaaacaatccccaagcctttcaagtctcttgagtacattaagcacagtggttgcaacagcaccaggggtcagaagaccttggcagtgcctgactccaccactaacgggccatgtgccattgggcaagtcccatgacttccccctttccacctacagagcctactgacagggctgggactgagcatcggaagagatgctgtccgtgaaagcactctcaagtcaggaactgaactaagaactttactcctcttgacaactcctcaccaaaaacaaacaaaaaacactgggacagttaataccctccccaggatgaggacactgaggcttaaggaggatattttccaatgctgctcccaaaaacagtgctcccaaaaaaaaggtcctgatgttatttatttatttatttattgacacgaggtcttattatgttgcccaggctggtcttgaactcctgagctcaagcaatcctcccacctcagactcctgagtagctgggattataggtgtgtactaccacacccagcctgatagaatctttaatgcaacatcctatgcagaatctagtgggtttttttcattaatttccagcatatcacaacattctcaaaacaagattctgattgacttgagtttaaaaggtaaatatataccagaagttaaggtaggaaagtgttataaaatccaacaggaaatgacagaatggcacaaatcctaaatggggggcactactgctttagtgaagcaatcagagcttgaaagggagtgaacctaatcacccactataaatccccaaccccacccaagccccagctgaagaatcccaagtctacaaagaaagacaaagaaagacaagacagaagggcaaatgcagtatcatcaaatcactaaatttccgcctcttccttgtccaaaaggcatccctctgctctcctcctgatcctcaaaatgcacattccacttgcccagtctccatcctgagaaagaaggggtgatcccacccctttctataataagataatattaataatacagtagtaacatcagttaacacttgttgagcacctaccatatgccaggcattcttttaagcagtatgaggggccaggggtcaggactgagtactagaactgatacaagtcagttcctgaagtaatccaaacttaagaagccctccaaaccagacccagaatgcgggccatgctccccctagtggcatgctggagttatggaggttccttagggccttgtcctgggggaagggacaaaggaagggccccattactgagagaactggaatccctgcttgggtaatgctactgtgtacacactccttgaactgggcagagtcagggacagctgaatcccaccactgcctctgcaaggctggatttagaccaatcctacctgacccttctgaaggataaggatttgacaaccttatataagctctctgctgtctactgagaggcctgcaagcatacatgtgccagaaacctgggagacatcctcaactctcccttcttatttctgcccacatccaacccatttcccaactgcaaacaattctacttccaaaatatatcttttatctgtccacttttctccacctctgatgctacccatctctcaccttaattattgcaaaaacctcctaattgccccagcttccactctcccctcacaaagtcattagagctgtctgaatcaccttttttttttttttttttaacaccagatcaggtcatttcctgcttaacacacttcattgacttcccactacacttaagataaaatctaacttcttaccaggacctacaaggcccagcatgattctcctcctgccttctttcagcacacttcctgcccttccctgtctgtgcatcagccacatacaactgcttttagttcccctgaggtgtcatattttttccaggttgtttcccgttgctgggacactcccctaccaagcagtctttgcctggatagctcttactcaccttgcctcaccttgactctcctgtctcttgactttcacaatcctccaatctaaatgaggctccccacacttatccttcagagcactcaccatgctgtgtaattatgcatttatacagttatctgcttaatctcagtcttccctcagaagagttccttaggatacgaaccttgactattttgctaaccaccaatattccctgcactttgtgcagggcccagctcacagctggcactcaataaatatctgctgaatgaaatgcataaaaccccatttcttcctgtccgacaggaagaagaaacttagagcagctatttcatgtcactcattgcctcttttcatcgacttacaaactataattacatttcttttcctcatgtgccttgcctgtgggcacaaccaaaaattcctgtaaagcctccctgtggtttgtttcccagaactttcctggtaaggtcactctcctggggctgccctccagggttttacagctgctcccattaccagtgcccactcacaggcctccaccaccaccgggtcattgccagaccactgtgtaggaatggcccagctcccacgatgacaaggttctctcaggccagcagctccaaggacaaaacacctcctctcccctccatggtgcaagacactgtgcttgtaaaaaaatacatttttactaaaaaaaaaagtcttatgtttcataatttggagatggttgtaaaaagttcagaaaaaaagggttctcttactaaaaagaattttgaacactacagtctggtggaaaaatgaaggtctaagtaacaccaacagcagtgtgactacatccaacgttccctcttctggcctacgctcccacccaaatctgaaatcctctggcttcatctcttgcccacacctcccctgctaccaaccacccgattacaggcacaaccacagtgcactgcctggttctttgaacactgcctgcattttcctctccctccctctatggctcatgctgttacctttatctgaatgcctctccttcccccactaacaaaatcttactgccttcaaggtccaactcatttatcacctcctctgtaaaatatttttcaatctcctgatagaatctgtttgtctcttctgcaaatcaacagcagtttaaagatgcctttactatagcgttgatatcactttatcactgttacttgcacacctgtctcccccacagacctgagctcctcgaggtgtatccactttagtatttcattcaatgtatgcaataagtgtgtgtgagataaacgaatcattgaaaagactctccaaacaaacaaacagaaacagctatttcctctcttaaggtgagggaatttgagtggatggacctacattgtacaagaaaatacatatatgtaaatcggattttggattaggtcactagaggggtttatagtactttcttgtctctttaaagacaactgaaattctgaacctgaaaacacaggaacagagtaaatcttttcaagtcattccttactttgggatcaaagaaattcaagtaaaatgggctgttctttcaatattattggttggatcttagaatgcctaagaaatggcagtctaatttcaaatgcctctgggaagcctagtttctaatgccccccagactggggtccagtggtattcccactgaaaacatccagttctaccaaattaatgggtgatcaggtcaagtgcagtggctcacacctgtaatcccagcactctgggaggctggggtgggagaattgcttgagcccaggagttcaagactagcctgggcaacataaggaaaccctatctttacaaataataattttaaaaaattggctgggcatagtggcacacgcttgtggtctcagttacttgggaggctgaaatgggaggatcgcttgagcctgggaggttaaggctgcagagagacatcatcgcatcactgcactacagcctgggtgacagagcaaaactgtgtctcaaaaaaaaaaaaaaaaggtggggggaatcaaacatattcctctccaccaattctcctacactgggttctagctgccatttatagaagagcccttaagggctttacagttttcctcttctgcctgtgaatggcaatgtggtcaagagggaagcttttaaaattcaagagtagacagctagcaggctggagcccagtcctggcttccagctttctggaatggtaaaatcctaggcaagtccctgtctcccttaggggcctttgctttttcctccacatgagagggctggactagctgttcaagcatccttcggcttgactgtcctactgcatcattctacgcagtcacccagtcctactgctttctaagtccaaagcagcagaaagactcctttcagcagagccccgggcttggggctttgggatcagacagaggtccatcaccaatgaacagtagccttttttagaagaaaaaaaatggaagactcaggcttcctgcctaaggagggctggacagagaagaaaggtgctaaattacagaatggggaaattaggaaatggcctggaagaggactaaggctcctgctgaggtccttgctcagactcacccctatccataagtctgagacaaagttgcctttacaaagcagacattgaacagctgacaatacctaagttctcttggaagacaatctgtctactgcaaatcaagcattctctacctgggtgctatgagggccttcagatcaacaaaacaaatgtcttcctcaagatggcaatcctgggccccctccacctggaagccacatctggcaggacctgcacagtgttgaccactgccacacaaactttgcttgcacagccttcctaggaaggcagagaaatacccattctgtggtcaagtcctagtgttttatgataggaagttttcccaggtccttactcctgacctaattccccctgcctctcctaccaccagcaccccacccctgaccttaaggctctgaactagggaagtgtggaattcagtctataattcttctagaccccacagccctgcagtgaagcagctaccacacaccttcatgctaggttgcgccccctctccttcagtctgccagtcatccagccctagttcacctccgctcagctcacaaccctccgtataaagctcaatgtccagatactcacaacataggtactcacagcttgcttcagtttcttggagtctctgtgataacgttaatatataagccaattttctgaaatctctcaaatccacaggcccctgaccactgtcccttattaagtcggagcatgttaacactgggccacataaacataggcttccagccaggaaagactggatcaaggaagcaataccctagatccccatgaaagcaccattttacccttctaaaataggctttctggccgggcgtggtggctcacacctgtaatcccagcactttgggaggccaaggctggcagatcacttgaggtcaggagtttgagaccagcctggccaacacggcaaaactccgtctctactaaaaatacacaaactagccaggcatggtggcaggcgcctgtaatcccagctactcaggaggctaaggtgggagaatcagttgaaacctgggaggtgggggttgcagtgagctgagatcacaccaccgtactccagcctgggcaacacagtgagactctgtctctaataataataataataataataggctttccaagcttagctagctcagaactctgagttcaacaatgaccttaacctaccatgattaaaatcttcaggattgcggaggcaaggtgcaaagtggagggaaagggaagaggtagggtattaagaggaatgtggactcaagctgcttttctatgatctacccaagaaaataccttcagcctgggaaagaagtacccctaagagtaagatctgggcaaggctgtaggaagtgtgagcccagactgtgccaacctcctcaatcctagctcccctcattctccccggctagactgattctctagccctaccccccagtactcctcagaacaggctgccactccaatgccagccatgccccactgccttgtgtgactgcaccaaagctcattcagcttaattctcctgctagctgtaatattctttagagaaagaactatgtcttaactctgaattctagcttagggctgtgtaccacgtacaattaataaatttttaaatgaatgaactaataaaaccaaccaactaatcaatccaactaaaaagggtattaataatgtcaccacagaacctagaccatttgatgcttaacacctcacagtagtccagagtgtccaagatggggtgtgtatacaagatgattataagtggtatatggacaaactttttttaagtttttaatacttttatattacttaatgtatagaagaacaaagccagctactaacctcattattaccaatctcactgattagatcaatactaaagaagttacgttttttgtatgcttttagtattgttttatagcaggtagaagtttaaggagaggcggggcttggtggctcatgcctgtaattccaacaatctgagaggccaagacaggaagatcgcttgagctcaggagtttgagaccagcctgggcaacatggcaaaacccccatctctacaaaaaataaaaaacagccaggcgtggtggcacacagctgtaggcctggctactttcgacactgaggtgggaagctcacttgagcctagcaggaggtcaaggctgcagtgggccatgatcatgccactgcacgccacagcctgggtgacagagtgagaccttgtctcaaaaaaaaaaaagtttaagataaaatgggatatttgtgtaacctcaaagtatctctcccagagtatttattaattacaaaggtagaaataacctcacggtggagaaatggacacatatcaccttaatcaagtgatcaacgttaacaccacaggcaataaagacataatgacaccacgtaccccgataccatgtgctgagaagggcatttcacctctgtggtgctcttcccaaatccatgaccttgatctaattatgagaaaacatgaagtaaacccaacctaagggatattctacaaaatacctgaccagtactcctgaaaagggccagggtcatgaaagacaaggacagactgaggaattgtcacagattagaggagactaaggagacgcagcaactaaatgcaacatgggatcctggatttgatcctggaatagaaaaaggagtttcgtaagaaaaactggtgaaatcccagtaagtctatatcaatatcaattttagttttgatcattgtactgtagttacacaagattaggagaatttgtactgccattgcaacttttctctaagtctaaaattatttaaaagtaaaaagtttttaaaagccaaatttaaagataagtaaataaaagtatatacaatacatggttacaggaaaaaatcataaaggtaggtaagactgactcaagtttgggaagcactaaagtatttaccctacacccaagaaaagtcgcccccagaatgagaatcactgctgttgaagaatatttagtaaaatagggaaatgttcactttatattacttgggggtaaaattaataaatcatccctttctgttaaaaaatatatatatcacatatattacccatagaaaacagtctgtgttaaaataaaaataacctatgctaaacaaagcacagatgacatttattaaatagtaaatgggatatggcttttggaaagtaacttatcaattaaaatgctcacagactttgactcagtagcctcactcagggagaatatcctaagagaaaattcctaagtatgcagaataaatgtctgtttccagcactatttttaataattttaagaattagaaacaatctccatatcagtcattcctagattagtatttttttaaaccgcaacccaataaagaatgttttacattgtaatctagcatatgcatgtgtgagagggtgtgtgtgtatgtgcatgtgtgtaaaaaactgaaccaaaaaggtttctcaaaacaacactatctttactgtatgtgatgctctctgctattttcaatcctaatctatgttattaagaaattaagaaaacgaagtacatagagccccactaaactgatttcctgacccaataatggattatggcccttggtctgaaaaactgcactagatggactattgtgcagccattgtaagagatgactatggctgggtgcagcggctcacatctgtaatcccagcactttgggaggccaaggtaggtggatcacttgaggtcaggagttcgagaccagcctggccaacacggtgaaaccccatctataccaaaaatacaaaaattagccaggcatgatggcgcatgccttaattccagctacttaggaggccgaggcatgagaactgcttgaaccaggaggcagaggttgcagtgagctgagatcgtgttactgcattccagcctgggcaacagagcgagactctgcctcaaaaaaaaaaaaaaattaattaattaatttaatttaatttaaatttaaaaaatttaaaagaaactactataaaccacaaactggtagcagcaatttgttctaaggagaaaagagggtgggaggaaaacttgcttttcactgtatatctttttgtaccttttgaatttataacacgttttttatttaaaaattaactagctggctcacaccagtaatcccagcactttggaaggccaaggtgggaggatctcttgagaccaggagttcaagaccagcctgggcaacatagagaccttgtctctaccaaaaataaaaaaaaaaaattagcacaagcctgtagtccccgctacacaggaggttgaagtaggaggatcacattagcctaggagatagaggctgcagtgaacagtgatcacgtcactgcactctagcccaggagacagagagagatcctgtctcaaaaaaaaaaagaactaactttaaatggcaattacgaagactttattagcatgggagacaacgctaattatgcataataaagctataactacattaaaatgtaaagacatatgcaagtgaaaaaaatttataccaagcaataatcatgttagcaatttttttcctttttactaaattctacatattctacactgctgctattgtagatttgttttgttttgttttgtttttgaaacaaggtctggctctatcgcccaggctggagtggagtggcaagatcttggctcactgcaacctctgcctcccaggctcaagcaattctcccacctcagcttcccgagtagctgggactacaagtgtgcaccaccacaccctgctaatttttttattttttgtagacagggggttttgccatgttgcccaggctggtctcaaacttgtgaactattttctaccattcaacatacatttattttcttaaattaaatcaattactggtaaggacacaggagattttaaagttaatagtagcattttctttcttaagctaggtggtgggtcacttaaactatacatataaaaatagacattctacatattttaaataatttctcaattttttccaactttactgagttatgattgacaaaagttctatatactaaagatgtacagcatgataattagatatactaatacactgtgaaacaactatcacaaacaaattaacacattcattaccatacacagttaccattttgtgtatgtggtggggagaggtgaggacacttaagacttactctcttggcaaatttcaagtaaacaatacagtattaactatagtcactatgctgtacattagattcccaggatttatcttataactgaacgtttagcaacatttttttaaagaaaagatttcaaaagtggactctttcctgcaaccttccgctttgacctcggactcacggagccactccaacaaggtactgagataggatttaaaactgtcagtcaactggatactttccacctctgtgaagagaatctaacgtggactgtaccatccccatggcttctaaaggtttccctttcgaactctgcaggtgggctagtttcggcattccattcacactcaggactgttcttttgtttttcctcctttccctaccaagctattgttcattcccttacatttttaattacatataatctcttctagcatattcatctttgaatttccagcaggctgtaatgcagtactttctttgtacatagcaagtgctcaaaaaatatttcttaatcaatatcataggcaaaactccagaaaagaatatataaaaagtggcaaggactcagagaaggaagtattgatccctggagattaagtacaaatcgcatcaagagacatcattacttttagttaatgaggttactatataattattgtagggaataaaatagataatacatgtaaaacactcagcaatagctagtaagtgatccataaataacagattggggacttaaaaagtaatatccatacatatttacacaatatatatttgtatataatatatatatcataaatgaatacacacatatgcacatacatatggcaaagaatgtcagggacataatttatctggacttcagaaaaatctctcttgatctttaaagaaaaaaaaatcagagatgcaccggcagctggatggactggtaactcaggacagctgggtccaaacagtgctatgaaatgaatctgcatcaaccaggaagaggagctctggaactcctagaagtttaggcacatcccatctgtttttatcacatttattgatttgcatatgttgagccatctgatatggtttggctgtgtcaccacccaaatctcatcttgaattgtagttcccataatccccaggtgtcatgggaaggatccaatgggaagtgattaggtcatgggggccatttcccccacgctgttttcatgatagtgagtgaggctcatgagatctgatagttttataagctcctggcatttcccctgcttacactcattctctctcctgccaccctgtgaagaggtgccttccaccatgattctaagtttcctgaggcctcccagacatgtggaactgtgagtcaattaaacttctttctcatataaattacccagtcttgggcagttctttatagcagcatgagaatggactaatacacaatccttgcatcccagggataaatcccacttgatcatggtacatgaaccctttttttcctttttttgtgacttgaggccactgctcattcttcttcttcttctttttttttttttttttgagatggagtcttgctttgtcgcccaggctggagtgcagtggcgtgatctcagctcactgcaacctccgcctcccgggttcaagcgattctcctgcttcaggctccccagtagctgggactacaggtgcccaccaccacgcccggctaattttttgtattttcagtagaggtggggtttcaccgtgttagccaggatggtctcgatctcctgaccttgtgatctgcccaactaggcctcccaaagtgctgggattacaggcgtgagccaccatgcctggcctctttttttttttttaagttcaggggtgcatatgcaggtttgttatacaggtagacttgtgtcatgggggcttgttgtacagattatttgatcacccaggtattaagcctagtactcattagtatttttcctgatcctctccctcctcccacccttcaccctcaagtaggccttggtgcctgttcttctcctctatgtgtccatgtgtactcaatgtttagctcccatttataagtgagaacatgcggtatttggttttctgctcctgcattagtttgctaaggatagtggcctccagctccatccatgttcctgcaaaggacatgatttcattctttttttatggctgcatagtattccatgctgtatatgtacattttctttaaccagtctactgcgatgggcatttaggttgattccatgtctttgctattgtgaatagtgttgcaatgaacatacatgtgcttgtatctttataatcaaacaaaatttttttttttttttggagacagagtcttactctgtcacccagtctggaatgcagtggcacaatctcggcttgctgcagccaccacctctcagattcaagcaattctcctgcctcagcctccgagtagctaggactacaggcgcacacctccacacccagctatttttttttttttttttgtatttttagtagagacacggtttcgccatgttggccaggctggtctcgaactcctgacctcaagtgatctgcctgcctcggcctcctgaagtgctggaattacaggcatgagccactgcacccagcatcttataatcaaatcatttatattcctttgggtatatacccagtaatgggattgctgggtggaatggtatttctgtttttaggtctttgaggtatcgcaacactgtcttccacaatggttgaactaatttacactcccaccaacactacataaacattcctttttctccacaaccttaccagcacctatacttttttggctttttaataacagccattctgactggtgtgagatggtatctcattgtggttttgatttgcatttctctaatgatcagtgatgttgagctttttttcatatgcttgttggccacatgtatgtcttcttttgaaaagtgtctgttcatgtcctttgcccactttttaaaaatgggttttttttttcttgtaaatttgtttaagttacttatagatgctggatactggacctttgtcttattagactcagtgtgctgttgaattctatttgctagtattctgttaaggatttttgcatctatgttcatcagggatgttgccctgtaatattcctttctcttcccatttattctagatctcatcatggttaccctttttatcaatgacttggataagacacaattatcaaatatgtttatgataaattaattgggagggataatgaatatactagatataatcagagagaaaagcctccacaaactggaaccataggttaaatacggcaagatgaaatttttaaagggtaaaatatgtaattttacactgaagcttagaaaaatactgcaagacaacaggataaagatggttattagtgaaaaagacctgaggaaaggttcaatatgagtcaactgatgagcaaatgtgattttgagtttagctgacaaaacacagggcccagatcaaatgagattcatgtcctactctgctccattctggttagaacaaaagtgtttccaggggacatatattatatttgcagtcccggggtaaatggagtcttgaataacatttcagacaaatatattgaaagaaaaaaaggaaatcaagtcttttggagccccttaaactgagaagataacacgtctgattcatgaggttgtaagttctcctgcagaacaagaagatagaaaactaccgcttttatccccacggagtcatctctggggaataaagaacgctcacagaaagaagagacagctgggccctgcctgacctgccctttgtccctcctgctagtcacatcaaaacctcccagctggggctctgaccatccgagctttatcaaggatatagagcagctcaggaatccaaacaattctgacccatcatctccccaaaccatggttcactacaagcagaatcacagtgatatttttaactatcagagtgaattcttgtggatctttaacctcctatactaagctgtcatctgatagctgttgtgagcaaggactcaggcttaaatgctgtaaccgaaacattagatggtaggaatgcagcatttcagcttcttcagggattgctgggatatagacataccagcttatctcctgtaaaggaaccctatgatgcttcttctaaggatctggggagagagaagagcagtggccattcaacatccggttcttatcctaggaacatggaaggcggccctgatctacagatgagtcatactaaataaacgtcaacatcctacaggagaagatgccattttttaaactatcttctttttccccaaggttaagaacttagaagttcctaatctatgcaatgattagctccttatctaacaagacatgcactgggcccatcctatgtttctgcggaagagagctagtttgcctttgtgtaaaaagaggtccttatgaatgttcattcacttagagatcaacattgaacaacctgtgtgatagagaaatcaattagaccccacgattcaaggaagggaagatgagggagatgatgaaaggaaaagcagaggaatgtggagggaacggggagagtagaaagcaatttaagatcttgaaggacagaaacaggaggaagcttgtttggaagtctcagagtggcaaatttgggggaattcctgagcattactcccagggatgtcagggaacatacttgagcaccacttagccttttgaatttgcaggaaagaaagaattcagaaagcctttattccctccctgtctggggctccttaccctggggtgatacatctgcctacaccccacttagctggttggctgagctgtgaacgactgagaggaggaaggcagagtgaaaagaacaaagggtcaaggactactgtcccccgcacagctagtgccagcagaacactcccttcttacaaggccatgggactccagaggctaaaactggtagatgctagctcatctcaaacccgagcagataaaggaagtcaacgatttcacagttctcctgaaggtgatgaaagattatagccactcatctccaatgcagacagcctctgccatcagtaatgcatgacacagctcttctaaggtaaaggcccagaggagatgaagaaggggtgcatactctgggaaaatttggcaagatgaggcttgactctctctgcgtgctcccaagacagttaccaagttaccactgctttgtcacagagggtccaagacccagagagatgcgagagttgtcagaggcttagagacttatgtggttgggatttgggggcttgaagtgttttttgttttgttgttgttttagtaaataagactgtctcagcaagcttctgaagggtgaaccctgtacctctgttttatccaagatggctaggaagagagacagctcaacgacatctgacttcaccttatgctctgagggttgggagagaatgggatagactttccaaataaaataacaatttgccagccacaaacttccttcctctactatccaggtaatccatttcctccttaaatccctattgcaccagactggaggtggggagggggaacgggggtggactgtggcaatgttgtgtggaggagacagggacaaaaatgtgagacatggacccaactgctggctatggaacttgggatggaccccaaggccaaggccattcagactaaactaagagcaccatgaagtttactaccttgagaacctcttgagttctcaaggaagagagctgttcctgcctacagtggctggggcagagatctaaagcaagtaaaggaccagacagacgctgagaacctagaaggagcacacaaagcctaattcagcctcatgaccttgacttcctcttccagaagtgcctggacacagagcagtgcaccttcaacagcacaactcggccgttaaggctgcaccaaaattcattcaggagcccagccctgggcaaagcaaagcctcctgccccccaggatgcagcacttctctggtttgtcttcaggggctccaatgcagctgtatctgcggggaagctgggggtcaggacgcagaccacaagaacccactctgtgaggggtcactgctttcaaggacaccaaaggggaccctcatctctgcgttcctttcttccaccatgatccctctctgcttcctctcctgccatgtggggtggtgagaatggggacaagcagggcggaccgagcactcttttaataggaaacaaggactcggaggtgaccagctgcagaggtgagcaaagctccagaaggactccagcttctgacccggatggctgagtgccaccaccatttcagggaacactgaccaaacagaagattccacgctgctttgctgcggtcatgtctgagtttacccaagaggggaagctgctccaacagaggaagttaattagaccagacaagagcggggagcagaggtggaagacagggatgagacaagaaactgtggaggacaaaaagtaagatgaaaggaaggagggaggcagggaagggaggagaaagtgtgtgtgtgtggggtgtgtgtgtgggtgtgtgtgtggtgtgcatgtgtgtggtgtgtgtgtagtatgtgtggagtgtgttgtgcgtgtgtgtgtatggtgtgtttgtgtgtggtgtgtgtggtgtggtgtgtatggtgtgtttgtgtgtgtggtgtgggtatgtggtgtgcttttgtgcatgtggtgtgtgtgcatatgtgtggtgtgtgtgtggtgtgtagtatgtgtggtgtgtgtggtgtttgtgtgtgtggtatgtgtgtgcatgtgcatgtgcagcatatgttgtaagaggaggtgggagaggagtgggtgacacatcagagccgtcactgcaatgctgagcccctggctgtggtgatgactggccacagcgcaattcagcagtggtgtctttgcagtcagcttccgtggtcagcacaaggcaaaaatcatgtggagtcaagttatcttgaaaattcccttagaaaggcaccacactggagacccgccagtctccggggagccccattcagtactattcatatacattatttttgtgcactcctatgaatctgagaactagaaggacccaaggagtccatcttccttctctgtggttctcaaaaacaattctgaggagctgaaccattgatatggtctgaatgcttctgagtaagtttctctcagctctcagagattggtttatcacctaatgttatccagccagacggacttcctgcgaagcccacactctcttccatgctgctgttgtcttaaaattgtcttaggagggagaggcctatatcacgggtcccgccccaccactaaatagctgtgtgtgctgggaacagtcgcttcccctttcgtccccaatctccccttctataaaacagagccagactagatgaactctaagagcccagacaatgctctgctgaatgaaaaagtgctttgaaaagtccaagtacttcacaaacagaacgtgtcagtattggttagctctcacaggtcagaaacgttggtgtcttccgtcttgcccctcaagttcatccttcatgtcagtcctgcctcatctactctggaatattctctaggactcgcccccttcctctctcctgttgctgacctgccaggtcctttagcaggcctcctcactgcctttctctggcctctccaaaattatcctattttcatcgatctacaggagagatttccacaaaactccaccttcactgcatcacttcacatcacctatgtaatggcaggacttccagagctcaggtccctggctctgctctgccacacctacccctccaaggtagatcatcgccgtgacactggagtgaacatctctcctttccttataaagttgacccaactttaaagaccagaaaaatcctgcctcctccaaggaaagttttctgtggttttaagatacaactttcttgttctgaactataaatgtatccatggttcgtaaaccaacacagttaagatcttggatattctctacttgtttaacaaacactgtctctcccaatagcttataaattccctcaggtcagaaaataagctttatttaatatttgcatcacaatgtcagtggagctgaaaattcagcgagggctgcattgccttactgcctgatggtggaaagaaagatctttgttatctctccagcccttgacaactcacagggaatgttggggtacagaggaaggagagaagaggtggaattaataccctcccaactcctaaagtatcttcccgcctgttcctccctgctttcacccactctggtgggggaaagagcccccatcacaggctccaatccacctattctctgaggctgagcctgagcccatcagaacagcatgcagacagctctatttagctccattcttcatgttctgatccgcccgtgtgatagcaacagctgctcacagtgcctgacagtagtgggaagataaaaggaagaaagagacacataagaaagaaaagccaagaccagtagtcatcttctaatatatatttcatacctgggccctggagggaaatctgcttcaaattaagccccatctgttctcaagcccccaaagaggcagagcacccatgagaagggctctataccctgccagggcacagacaccagtgaagattggcagctgcaaagaaggatggcatccttgaggaagccaacaaactgggaggtggagcccctggctgaccagcccattcttagactcagagcctctgccccacaacacatgaccccaagacctccctgataggtaagaatcacataagtatgtaatgggtgtaaaatggggaggattgtcaggagatcggcccaattcccagaggaaagcattcctggccatcacacccaaggtactcagcaatgcaagcataacctagcatgcctaaacccaccttccccactactcctggcttctggccactcgggagcaaatacacctctgcaaaagtcccagcttttgtgctccccacagccagcccccaccatcgtctctccagatcttctcctgtttataagatgcattcactcctaatctccacttccagacacacacacacacccttgggtagacacagggcaataagcctacctctcaggctcaacttctgggctgcacacagtggggtggcttgctcccgtaatcccagcacgttgggaggctgaggcaagaggactgtttgagcccaggagttcaagagcagcccgagcaacacagcaagaccctgtctccataaaaaaaagatggaaaaattaaattctgtaggattcactccctaaataattaaaaatttaaacttaaattttaaaaaaccaggcttaacttctacccagtgtgtgttcatgctcccttgggccctttctgcttgcaggagctgatgatgctgggtgcactctgaaagattttaaacctggtaaggatggtaatgccttcaggggccagaggatgccttcacaaaccattcagagtgtcaacagagccagactggggagacgtccagttataccaagaccaagaggcagattctctcatctgcctctaagctccttcctcacaaaaggtatctgccacacccatctccagtgccaaagatggatcacagccgactgagccgactgtctctcctcctacccctcacccccgccttccagagtgacagcgagacaggaaagcaagttggaaaatttttaaaagaaccaacacctcggccaggcacagtggctcacgcctgtaatcccagcactattggaagccgaggtgggcggatcacaaggtcaagagatcaagaccatcctggccaacacggtgaaaccccgtctctagtacaaaatacaaaaattagctgggcatggtggtgcacacttgtagtcccagctactcgggaggttgaggcaggagaattgcttggaccggggaggcggaggttgctgtgggccgagattgtgccattgcactccagcctggcaacagagcgagactctgtctccaaaaaaaaaaaaaaaaaaaagaaccaacacctcatcacaatccatgaaaagctagctcctggctctaggactgcaagaaaagggaattccaccttcaaactcctggttaccttccatggctggtctcagtggaactagcattcctcctcacagaggcatgaggcagccacaccccacacagccccagagcccagaggcagagttgggcagaaaggaatgcagatagtttcccagaagtgtctggccgagaaggaaaccaagagcttacccacagcttcctgggccctgactgggaggcactgggttctcacaacaaggattctggcaattcagggatggtgaggcccttgtatgtgaaagcccacaggaggcgaggacacagtggtgggaagaggccctgacagaacaagcctgggctggccccagacggcttccagtaagcagcggctgcacttgaatgtcagcaagggtcttagggagacccgaagcaatccagtcacaggggagcccaaggcaggcacgcagatgtgaggtcggatcctcttagcataggctttggcgtcacctgctttccaggaagcaggcttcattttctaacacatcttgagggaggagggcaaaccggaggggaagcccaacatctgacaggccagcaaagctggtgagcagatgggctctaatgcctcccagcttgattctctcagtcatgcttcagaggtcataaggctttttttagtcctactgttagtaccacagctcccagaagcctgtgcttcctccaaattatgaccctgtaaggctctgttctaggataagcacaggagaaggagcagaacacagaaagagttattaaagatgccttcctgttatatactaagtgtccacgtgaaggatatcaaaataaaataataaaataattttaatttaaaagtggattacatcattaactgtttcctttgcaaggaaagggcaattcctaatacagattccataaaatccagatgacacttccccttctcatatacgacctggactctgaaaaccttaatcagttgctagcattaatacaaaatacacacagagacacatatagacacacgtctgttcttcaaagctttgttcgggaagccaaagatacaagaacccttccaacttcatgtccctatggggataacaggaggcacagagttaaatatggtttttcccaagcaaagaccttggctgcgaataggattaagggtggctctggacacccccacatgcaggaagaaggctaagcacctggaatctccccttcctccacagcaccagtaaatgaactgatgtcatctctctggtagccaaacatgtctgtctcccagcccctaggatttcacccatccttacctcaaaattgcataataagggtctgcagctggttagttcagttactcacagcctggtgccagtgaagcaaaggtaaaaagttggctacttagagccattagtttcaccttaccctgtggccacagattttaactgtttaaacctagatcaaaatgcatgctgcttttttcagagagacaagaccaaagatgaactcaaaaagagcatccctgggcaccacagaaagaaggacaaagataaaatcagctgtgactgtacttctttggaacgggatgacacatgctgatccccaagcaagaacatctggataagctttcccaccctcacaggaaattttcagtcacctggaacctagtacagtttggaaagtcattctattttcctgaactgttcattccacaaggagatgctgcagtttacacacagtgcactgggacatcttcagttttcatagattagcagcatatgcgtcctacaggaaaggtctgtagctttaaattagacgctttccatcctaagacctgatacagcattgcaacaagaatgtattatttccttgtcaaaaatcagaggagataactccactaaccccactaaacagtaagtttaaagaatgcgatcctgtcataattacatcatgattttcaaagtgggagaatttcattgggttttaagctcaagtttttcccagtgtgacacacagtgcgaaaaagaaaagagcttaggcaaagttaggcatggcacattccagctcctctagccgagactgaagaaaacagacctagctttcctgacctgctcccggaagcccttggaagcacttttcttcctcttcatgcaatgggaacagagtcagtctcttctagagcaacttcaccagcaggggccagagggtgaacagactgtgttttcactaaaagctcctttttcaggcagtcgccctttataggttgaagacagttttccacagaaacaacaccagacatggtagccagatgcgcagacaagctcattaatgaacaacatggctgaaatactgtttatacataataaagacacaaaacaatacctctgtaaatactagcaataaaacaaaatgtaagaggaataaaattatatcatttttggccaggcacggtggctcacacctgtaatctcatcactttgggaggccaaggtgggcggatcaattgagcccaggaattcaagaccagcctgggcaacatggcaaaacctatctctacaaaaatacaaaaattagccgggcatggcggtgtgtgcctgtggtcccagctactcgggaggctgaagtgggagaattgcttgagcccagagggtggaggctgcagtgagctgagatcgcgccaccacactctagcctgggcaacacagcaagactctgtctccaaacaaacaaataaataataatttttacgtgtttcaaattgtggtcctggaagaagggcaggttaattaaaagatggatatctggggggaatctttaaaagcattctcaagaacaatagtgatggcactgatacttcaaaccgtctactttcattcccaaatgtctgactgtcctttcagaagtattcttggtttcacactttaccagctatgatcaaagctagcttttatcccacaggcaaaaaggaaaggggataaggagggttttttgggaggcaattaagcaaaatcataaggacagaaagagaaggaaagatggggattaaagaggatgtgagtaggatctgaagaacacttacctgagggagacctaaattacctgtgattggtgagagatatagaagccagctggttcatgactactgagaatcggagtgccagggaggacgcactggatattatgtgacagataccagttggatcacctgcctaggacaacttaagatcaaagaatgggggaaaataccaaatgccagacacaggctcacaactcttatccagccccagatcaaactattacttcaaccagacatcgttggcattcgcaaggaacacgtctacagagcctacggggaatgctcactgcctgttctcctgagctggctggctgagtaccgatctatctaaagaaaataaactaccccagagttctatgtcacctagctctaacagtctcaggaaagtaggaggcatcctcatcggggatgtaggtcacagtggagttagggcttatggaatacataaaaacatggtgaatatagggccggggatggtgactcatgcctgtaatcccagcactttgggaggccgaggttggtggatcaggaggtcagaatttggagaccagcctggctaacacagtgaaaccccgtctctactaaaaatacaaaaaaaaaaaaaaaattgcaaaataacagagaagtcctacttgaaagtatacagaatcaattatggagctcttctgcccagaaatattctacttagctccacaactttctctagcaagtttcagcagcctgagagcctcccagggttgggcacagcaacagtgagcatgggtcctcatcctcatcactaaccctgcaaagacaagcatccttctgtacttcttttttttttttttttttttttttctgagacggagtcttgctctgtcgcccaggctggagtgcagtggtgcaatctcagctcactgcaacctccgcctgccaggttcaaacgattctcctgtctcagcctcccaagtagctgtgattacaggcattcgccaccatacccggctaatttttgtatttttagttgagatgaagtttcaccatgttggccagcctggtctcaaactcctgacctcatgatccacccgcctcagcctcccaaagtgctggattataggtgtgacccaccgcgcccggctactttgttgtttttgagacagggtctcactctgtcacccaggctggagtgcagtggcacgatctcagctcactgcagtctcgacctccctgggctcaggtggtcctcccacttcagcctcccgagtggatgggactacaggcacacaccaccacacctggctaattttcgtatttcttatagagctggggtttcaccatgttgcccagactggtctggaactcctgggatcaagtgatctgtctgtcttagcctcccgaagtgctgggattacaggcgtgggccaccatgcccggccctcagtacttctttaggagaatttctgcccgacaaaggaccacagaacagcaaaatactttggagattgtctttgtccaactcattctgtactggaagaagccaatgcaaatctttaactggaacaaaaaaaaaagtctaaactatgcaagatctgattaaatctcagtcatttcagaagggtacagggataaggaagaaatgtagctctgtctgagtaagtgtatttggggaggagggatggggattacataggcagaagttaaaccattttgtttcttcttcaaaggcctgcctctcaggaacaccaagaggacacctactcagttgtttccctttatttttctttttgagatggagtctcgctctgttgtccaggctggagtgcagtggcacgacctgggctcaccacaacctccacctcccaggttcaagtgattctcctgcctcagcctcctgagtagctgggaatacaggcgcccgccaccatgcccggctaatttttgtatttttagtagagatggggtgtcattctgttggccaggctggtctcgaactcctgaccttgtgatctgcccacctcagcctccgaaagtgctgggattacaggcgtgagtcaccacatccagccgtttccctttatttcttagttcttgatgatagggtcccccaaataccctccccttccttgctggaaccaaatcataccaccctcagggtacaagaatttgaacatagccatgaacagaaccaacaatcaataaatgtagagcttggacatgttagcaaacatcgaaggtctctggaagctacaacttccaaggaccaatctccgcatgatggagaaatcaaagccaggtgaagatctgggctgagtttcaaatattcctgagtttatgaaggaggtggaaggtgggaagaagaattctggaactgaacccgcagaaggctaagcctcccacatcccaagggtgacagcaaacacgtgtggacccacagcaagccgaggcatggacaggcagttatctccttaagttatcctcgtcagagaatttccatcagtttttcttaccacgttttatactttttcaaagtgactacatatattacttttatctgtttggagtcatctgagttcccttccagttccactaaggatgctcacactaatggttctctgcctcttgcctgtctagtctttcctggatctcccaggcttactctttagattcctatctcatacccacagagtcctgtcttcttcaccatgaaataagttcccctctaacaaaaggaaattcagacatacaaatgtgccttgcgcaagatcccaccacaaactagtaacactgcagggattagaatccaattctccgaactcacgtccaccgctccttccaactgaccacaacacctccgttataggagaaacatctgccctacagcaccacgaccaagaatcaaaacagtttactgcatgtctttttaagcaaaacaacacagccagaatgtttggcagggactaactaaatatttcctctgtgacctatgccagagaggaaaactgtgggagttgggtaggcacagcacagagggaaatcgaagagaccactgcaaaggccagcagatgggtgacaaaagaggaaaaatgcaatcctaaactgaggacaagctgggaacaaaggaatccgagttttaaaagtggttgagatctaaagataggattgtaggtctaaatgggaatgttatctaagagggaaagcatttacggaaaacttaggaggactatcttcatgaccttggggcgggaaaggaattcttaaaggacacaaaaagtgctcaccaacacaaagcttgatcaaaaggatatggagctaaaatctcagagcaacatagaagcaatgaccattcttaggcctacaacacagatgtatgctgaagcaacataacacaggaatccaagcctactcccagcaccaaggtctgaactgaaacctggcttagaaaaaaagcccaaaggcaaaacattaactttccagtgaagaaaaaaggaggaagagagaaagagaatggatactaatttggcctaacagaagctagaataaagcttgcaacatgataaggtacacaggaatctatgagaatgagatggaagccctgggaaaccaggagcatcatcagtggaatcagaaggaaattcaagggacccgaacaaggatctttgccgggggaactgaagaagtcactgtatggaactagatccactgatttaaaaaacaaaaggtaaaaacctacctgaattatccaagaaagaaactctccaaagggtgtgaaatctgtgaaaagagtggaaaggttgttaccaccaagtaaaattcacttacactttccaataacctttaagaaagggcttcaaataggatcccttaattgtattagaggctctgatattgacactgttcaactgaacaagaaaggtgggcggggagttccacagaagagcaaaggggtctgaggccagctttctacccatgctcagggcaacaggctttccctcacttctgaggtgaccacaccagcaaactgggccaccagtggtccccctccccagtgacccctcctgtcctctcacaagcattacatacagagtggggaagagggaaggaaaaaacctggagctcttaacctcaaagggtttccattctactcaaagtgccaggacacacattcctaaggtccagaacccttgcatcaacacctcagctcaagaagcacccaggagcagaccagactctgggttgggaacactgttttgttaggaaggagtgctgataactacagcagagacaggagaatgagaaaaggactaagagaacccaggggaagggaatttcaggagacagatgaattgcttcctgattatgaactgatccacttactggacagtctatgagacaaggagttaagctaaggggagttttggggttttttttcaaggcagctcttccccaggtggaaaaattgagagcacagacaaaaggaaggagtgacctccctggaagcagggaaatcccccgcccaatgcctcatttgtaatcaagggcagcgagaatgagactaatgtaaacaggccagggaagccagcatgcccttctccagagaggccaacacacacacttcccccagcacagcccctggaaaggcagaagtaggtattctcttggacaaaagagaggggacttggggagttcccaaggtgctttcaggcttttctgttcccaggcactcagcattcaccaaaattccagggcaccaagaccacaaaaaaggtgaagctaagattctgctgcttggaggaaaatgcagtttgcaaaaagaccccacaagaaaggctcagaagaaaataatagggctgaacggcaggaccactcccacatctgagcacctaggcctgagtcgggcaagcttcccacacccctcccagcaccaacgcaatgaacagctgccctggagaaaacaatggggcctttgtctgtgccttctcctgtagatctctttttggagaaccaaacaggataattcctttacaagaggggctctcctaaatatcagtcccggccaagatgaaagtttttaccatccacagcatccctctcaagtaagactcctacccgttccatattgggcaggaagggtgctgtgcagtatccagccccaccccacataggaagcactggcagacaggtccttgcagccccttcctgcagccctcaccagtcacacacaggagctgctactcctgctttcttcctggcctggccacggaactgaaagcctaagaactgttctcactccccttttgccatccaccagaatattccatattgagtgaaattacaatgcttgttgatactgttttcatcaaaatctgtcaaaatggactcccaacagtaactgtgattttaaaagaaaaaggcatgaaacaagctggacagtcaaacttctcttaatgttgcactactaaataaaaattcccaaactgacaaatatcaagaaacttacgctgtcattttccatgattcaaacatcttaaatctaacctaactatataatagacaagtggaaggttctttctttgctgtcttattagcccattttcttgacttgtttttaatttatttattattttgatttgcaaatgtctcttcttatatgttgtgaagatgataatagatttgaggtttttgtttttagtccctttgcctaaaaaaaaaatttaaaatttttcctatattggtccaaattaagaaacaaacaaacaaacaaacaaaacgtgtgtttttgtgaagccaggtgcctcacgcctgtaatcccagcactctgggagaccaagcttggaggatcgcttgagctcaggagttcgagaccagcctgagcagcatagtgggacctcatctctacaaaaaaaatctaaatatttaaaaaactatccaggcatggtggcacacacctgtattcccagctactcaggaggctgaggcaggaggattgcttgagcctgggcggtcgaggctgcagtgagttatgactgtaccactgcactccagcctaggtgacagagtaaggccatgtctcaaaataaaagaaaaacgtgttttgtaaaatcccatatgccacatttctcccattttccttcattgggtaactggtagcagatgaattcaggacccacttcttccgaaccaccaccatggactacatgacatggcacaaaattccctttccatgaaacggaaacagtctgagcaactcctgatgtctctctcctcgattcctctattctaaccatcattcttcctctccccaaacacctccagatcaagggtacttgggttttcaggccagttagctggataccatgagttccccagttcaatccagagtatcccccattctccacgatttcagcacaaggcggcatcacaaagtagtagaaagaaatctgcaatcaaatgaaccaaagttcaaatcctggatcttcagtgatttacataatttctctgagtcatgatttcctcctctctgagacaatccgttcacgaaagtatcaagttgtgaacggcacatagtaggtccccggtgctgactcattacttccttgacaggtttctctcctgtcctcccaaaaaagataggctttttagagacttttttaaaaacagggagctggaaatactgatattaagaagacattgttccacaaggaatcaaagtcgtgcagtgtcccttaccttgctgtgctggtcacattccgatgactgccctcaatttctttccagcctctcttaggaaaggcccagaacatctatttaatggtataaacctccatttctccctctcaagagtctggagttatgaattattaggtggctcagggttctctaagggtaaggctttcagtgtcatcctggaaaatattaaaatgtggaaaaaccactcatcccaccacctcgtgtttctgtgtggtatcgactcgaccctttatggtttccttttggagtgcattcaatctgccctgcgcaaacaccacatcaggtctctatcactgtgctaaacaaatgttccaaatgggaaaaaaattgtcataaatattttttgggactgctcacagtcttatttcactgcacttatttcaagtctttcacttatttaaagtcttatttcacttatttcatgatggagacatcatgaaagacaaagaattccctgtaattccctgtaccagaaaagtgtcacacgtgctacctttcctgagaccaaagagtttatacagttaaattctttacagtaagggtgatttcgtaaatgcatacattcagtttgatttaatgtttaggactctgtaaaggcttctcatgtaagcaaattcaaaaatcaggacaaaaatcctgtactggcctaaggatctcaaattttggctccaaaattagagttgctcttcttttctctcttttttttttgaaatgcagtctcactctgtcacccaggctggagtgcagtggcgcgatctcggctcactgcaacatccgcctcccgggttcaagcaattctcctgcctcagcctcctgaggggctgggattacaggcaagtgccaccacgcctggctaatttttgtattttttgtagagacggggtttcaccatgttggtctcgaactcctgacctcaggtgattcgcccacctcggcctcccaaagtgcagggattacaggcgcgagccaccgtgcccggccggagtcactcgtcttaataacaagctaaaggccctaattgagcatgtggccaatgtggaaccttaggctgcagcactaagcccaatcagcccattgctactaagtacaaaacctgcaagaggaacagactctcagtgggcctcaatttcttcctctagcagaatgtaaataagaatctctgcatttgtaaaaatgtccagaagattactaagatggaaaacagtcactgggaaggaagcaccccttcaggggtcattcttggcctcacttgctcatgcctggcccttggcaacagctacctccacagatctccagccccaccaccgcctctcctttccaagccctcctctcatacggaatacacaaatcctgtcacaaataatacgctgtctggctgccgtaaatcaccatcctgctcatgccacccctgtgctttcccccaaggttgatcctgatattctctacctccagaccctttgcacacaccactccctcttcccagaatggcttccctcctctgtttgctaagccaactccaacagtccctcaagatgccgctcccacggcacctcctttggttgctttctctggccatgggcttcccttgcatcttctcctcaacattctttgctttcctctggtcaaacatctgtatcatactccattgtaaatgtctgtttatcttatgtgccctaaaagaatgttatattaccctccttacatttaatatttaaatttttgcatcacaaccagtagtaaagacgtactttctgccatattctaaatattggcattttataaatatttacaggcctggcacagtggtgcatgcctgtaatcccagcacttgaggaggctgaggtgggagaatggcttgagctcaggagttcaagaccagcctaggcaacatagtgaaacctcagctccacaaaaaaatcgaaaagttagccaagtgtggtggtgcatgcctacagtcccagctacttgggaggctaggtgggaggatggcttgagcccgggagatcgaggctgcagtgagccatgattgcaccactgtattccagcctgggtgacagagcagaactctgtctcgacaaaaatgttttattaaaaataaataaatatttacatttttaaattaaatacaacattactctcttaaatgaatctaaatgatccaatggactctaaatgccatagtggatcatctatttaaaagaacatacattttatactatgcctttttgttaactcttacttccttttatttcgttttcagaattttatcctaatatttatgcttcaaaatcttttactgatcaacctatacttctctgcaatatatatattagtattatacatatatacatataaatgcataaatttttaaattctgctatgattataacctcaattttttattctatttattttatttttttttagagacagggtcttgctgtatcacccaagctggagtgcagtggcataatcatagctcactgcagcctcaaactcctgagctcaagcaatcctcctgcttcagcctcccaagcagctagaactacagatgcccaccacattgctcagctaattctttctattttttatttttgtaggaacagagtcttgctttgttgcccaggctggtttcgaattactggcctcaagtgatcctcctgcctcggctttccaaagtgttcagattacaggtgtgagccaccacatccaggctataacttgtaaatgttaaaaaaaaaattcttcttctggattgggttttcattatctttattgtttgaatatgcaaatgatcaaaacataattggtttagaaattggtactattattaaacataaaaagtaaaattttattcaaaatgcattaatttttcatttttatagtggtaagcaccaagaaaccttgttcacataaataactaaacagaagtgacagtctacagccatactaccctgaatgtgccatctcgtctgatctcaaaagctaagcagggtcaggccccgttagtacttgaatgggagaagtaaaataaattttgctatagcaatatcagtatctttagaatcacaagtcaaaatcatgtcatgacctataatcaaaaattatttttaattatctaccaactgacaatgccttcaattttgttgaaagcaagaattggaaaccatctgacttagaaaaggatttgctactcacagtcattcactttcctaataatagtcctaattgttcctttgcttgttaatctggaggctttcacacatcaggcacacaaacagcaagactccagattaataatgactatgtcttccttttgtaaagtgggagaagagtgattgagaaaggaaacaccttgagtgcaactgaattctcagacagatcagcctttggaaaggggacatagaaagtcaaggatctagaaaatataccctgtctgaagactactagcttatctgcctctcccaccaaaacagtggcattatcaaaattaacattaaattatgtttattcgtggataattactgttatattttaacagaaagagactgaagacagcctaaatgtgctcaataaaggtctgattaaataaattacagagtgtctagaaaccaaaaatacacggtttctcttcaggactgaatcaagtcccttcagaatcagggcccacactttattcccacagcctcagctcctacaagcccttcgaaggtcctcatgtgcatcattccccactgcaagtaatggtttctagatgggaaaccatggtccacagagcaacacagacagggacgtgccagaggacataaggacagtaagacctaaagtgtactgctgaggcttgttatgaacactcatggaattgcaacctggaagcctatgtctggggaaagggagaggggacagtgtctatgctaagagaacaagtagcaaggagccagaagaaggctgagtgtggtatgaaggaataaatactcaagaagctggtaaggctggtgacattggaaggaagatcccccaacaggctgctggccctagaggtcagggcgctatctatccttggaagaagacaagtggaggacagtatcatccgaaccaaagcagcgcccaggctgaagggcccactgggcagacactccaagagaaggctcatggtcatcacaatggggaggaggggagaagaggagtgagccaagacgcggctgcttgcggacagggcagaacctacagatgggaacaaatgaacctggtttcataaaacagcttccctcctctgtgccccagagtagtcctcccagttaaagtcccctttctcgttctcttcaccaagtcaaatcctgccaacctgccaagggccaagatgatgccccttgttctccatgcagcctcctcaaacacttctgcttatagtcagttcttctacctctaaaccctcatcattctctgtttataccagaggcggcctgcaatatttctaaaccgctccatgatccatttgtattttgatattaatccttagctctttgctgtaggtgtttgatgcctctctgaagataaggcttgtgacttagacatgttcctgtcccacagggtgacccctcaatgctttactgtgcgggacacctacttgcttacagttccaatggacacacactgtctcctgccactcatccaaatgtctatctctttcacaaaattaaaggttcattatatacatgtggattctgaattcttgggtctttcatagtctttggcttagggcttcacacttgctaaccactcagtgaaacttctccagagtcagtcattcagctgctgctctacctgaggctgtagcaccaatgagccagctctccagagacacgcccacatggtacaaaccacgttctagtggagagcattctcccatcatgggaggctctcccttcaagctaatcttaacaagaatgaaatgggaatttggaatttcgtttcccttatacaaagtcacttcctaaaatggggggattataattaggtgatcattaattacactcgccattacaaaattcaaaatacctcaattcctttaccttttataacgaacataaagtgggatctcaatagtatatttaaaagaatttctcacaaatctcagtaaatacaatacaaataaaatagtttgaaactatgaaagaaagatcagtaaacagagaagaatgaatatataggaaaagggtataagcagtcaaagaaaacaaagcttaacgatagaaaagaaaagaaaagctaatccctgtaatggaatgccttcctcacagcaagctctcaatatttgtcatcaaatttacagaatggctgatattgattctcaaggcaatgaaacagactacgcaagtgctggctgcaaaagaaacagaaacgtaaggtccatactaaatgaactgatgaatgcaataaaaacagaagtgatgctacagaaaaaactaatcagaaaaagatataaaatacaaaaatatatttttcaataaaagattcaaagcatgcacaagatgacaagcacaagaaggaatgcagctcagagaactatcccgcaaatgatcaaagtctttgaacaaatggcctcaaatctataaagtttaatagaaaaaaatgctatctaaaaacaacagaaggatttgctctgagtacaaaagatgtacaaaatcatcaaccagagactaccactatgacattctcatatttttaagcataagaaaaagaaaaaactcagcaggctgagaagacccaaatccaaatttcttccaattttgcaaaggatacaattaaagtccagagatgcatataaaactctcagagaaagtatttttacctccagtgtaacaaggtgagtagactctttgagcaagtgaaaaagaaatatctcttagagctttgatcatacctgaagaaatttacccatcacacacttcactttaaattatgtccaagaacaactgtaaatgagacttaaatgttttaagttttacaaataagaccaaagaacccaaatcaataatttcccattaaaaataataataaaatgttaaatagggaaagagcaattgtcaaaaacacattattaataaaataggactgcaggcacgtgccaccatgcccagcatttaaataccagacaacattgagacaactgaggacatttaaatatgacctgaataacagatgatattaaggaattattgttagtttggttaaatgtgagagagtggttatagatttttaaagttcttatcaaatatgcttcccgaaatattattgggtaaataacataatgtccaggaatggaggagaaagataaaattggcaaaatgttaataatatttgaagcagattaagaatatatggagttcattatacagatgggaacaatggctatcattattcataatagccaagatactgaatcagttctcctgacttttgtgcatattttgaaataagaagttttttaaattaatatttattgggtatctactgagtaccaggtattgcttaggtatttgacacaaaaataaaatggcctcaagaaaaaaaaaacagtaaagcagattcttaacccagggtttatccagggaaatatccatgatttctatgggtggctaaatcacaggtactgccattactgctgttttattgcctatattcataataaaaaagaaatactaaatttcaatcggggtggatgaaaatgatgtaattttttttttcctatccaagttgcagacccttcaaattctacccatggacccccaagggttgcaccattctgcaaatattcactgaacacttaaaataagacagtcactgctaagcactagggatacaaaggtgaagagaatactacaggccgggcgcggtggctcacacctgtaatcccagcactttgggaggccaaggtgggtggatagcctgaggtaaggagttcaacaccagcctgaccaacgtggtgaaaccccgtctctactaaaaacacaaaaatttgccaggtgtggtggcagatggctgtaatcccagctactcaggaggctgaggcatgagaatcacctgaacctgggaggtggaggttgccatgagccgagatcacaccattgcattccagcctgggcgacagagctagactgtctcaaaaaaaaaaaaaaaaaaaaaaacagacagaaagactgaagagactgataaggccaggcatggtggctcatatctgtaatcccagcactttgggaggccaaggtgggcagatcacttgaggtcaggagtttgaaaccagtctggccacatggtgaaactccatcactactaaagatacaaaaattagccaggtgtggtggcaggcacctgtaatcccagctactcaggcggctgaggcaggagaattgcttgaatccaagaggcagaggttgcagtgagctgagatcgccccactgtactccagcctgggtgacagagggagtctccatctcaaaaaaaaaaagaaaagaaaagaccaataaggctgggtgctgtggttcatgcctgtaattccaacactttgggaggccaaggcaggtggatcacttgagcccaggagttcaagaccagcctgggcaacaaggtgaaaccccgtctctagaaaaaatacaaaaattagccaggtgtggtggtacatgcccataatcccagctactcaggaggctgaggtgggaggatcacttgagccaaggaggtcaaggctgcagtgagctgtgatcgtgccacctcactctggcttggaggacagagggatacccagtcacacacacacacacaaaaactgataaatttcacattaaattactaaaaatttttgtatgtggaaaacaaagttaaaagacaaactgtgaaaaacatatgtagtatatatgagttgttcttaatattttaaaagttggtaaaatgcattaaataaaatataaaactgcttgatctgataaggggttaatacccaaaatatataaggaatcaacacaatagtaagaaaacaacttatttaaaaatgggcaaaggacctgaacagacgtttttcagaagaagatatacaaatggccaacaggtatatgaaaaaatgttcaacatcactaatcatcagggaaatgcaaattaaaactacaccgagataacacctcacacctattagaatggctaccaccaaaacgacaaaagataataagtgttggagaggatgtggaggttgacgggaatataaagtggtacagccattctggaaaacagcatggagatttctcaacaaattaaaaatagaactatcatatgatccagcaatctcactactgagcatatatccaaaggatatgaaatcagtatgtcaaagagctatctgcacttccatgttcattgcagcattattcataatagccaagatatggagtcaacctgagtgtctatcaacagataaataaaaaaagaaaatgtggtttatatacacacaatggaatactattcagctataaaaaaagaaggaaatcttgtcacttcctacaacatggatgaacctgaggacactatgttaaatgaaacaagccaggcacagaaagagaaacaccacatgatctcacttatatgccgaatctagaaaagttgaactcatagaaacagagggtaaaataaccattttaccagaggctaggggatgaagggattggggtgatgttggtcaaagaacacaaaatttcagagagataggaggaataaataagttcaagagatctactgcacatcatggcaactatagttaataacaatacatcacatacttgaaaattactaatagtgtagattttaactgttctcaccctcaaaaaaacataggtatgtaaggtaatgtatgttaatgagcatgacttagtcattctaaatatatatatatataaatcaaaacagcacattgtacatcataaatatatacaattatttgtcaatttaaaaataaaataacaaaaacatgtaaatcataaaagaaatagaaattaaacggccattaaatatatgagaaaatattcaagctccatagcaatccaagaaatggaaattaaaacagaaatgcaataccatttttatcttatcagatttgcaaataccgattatcttcattctttttagtttggcaagaatggctggaaacaggcactctcgctcacgctagtagaagtgtacagtgtacacaggttaaagactttctggagggcaatttggctaagcacatcaaaagtccttaaaaatgttcatcccttttacttctaggaatccccaaaataatcaaggaactgcactaaaatatgggtataaggatattcaccatagcatttctgtaatagtttaaatacatagggggggacaaactaaacaataacaggagattaaagtagatcaaatatttagtattttgtgaatattttttaattcgttttaaagtattcatatatattttggtatatatataaacactaattatctctgtgtagtaggattgtgggtgatctttttcctattttccaatttttctagaaagaccatgaattacttgtatgaaattcaactaactaattaggggggaaatgccccattatccctgggctcctgaaagcccaaagccaccagtagaggagaaaaacgttataggtataaaagcaactccctataacagttgttgcttctggagagcagagaaggccttgattctgcctggagctgagttttgaaggatgaatttgccaaagaataaagtgaggagggcaagagactatcaagtgcaaaaaatgaaagcgcctactatgttgacaagctacatgcaatttcggcgtggcagaagggcagggtgcaagtggaggactgaagtaaaagccagatcacaaagacttctgaatgtcacattaaagggtggaattatcctgtcaaagaagaatcaataaagagctttcgtggttcattaatatggggatcaaaaaaaggtaaaacaggccaggttcagtggcctataatcccaacactttgggaggccaaggcacaggaagatggcttgagaccaagagattgagaccagcctgggaaacatagcaagactttgtctttacaaaaatagtaaataaacaagtaaataagagaaaagaaaaaacaaatgataacagaagagtaattgggataggaatgtggatactgtctgggaagaggcatcaggtgaccttctgagatgccagaaatgctccacatcttgatcggagtggtagttataacaatgtatgcaaacgttgaaatccattaagctatacatttaaaatttgcgtactttactgtgttactcctcaataagaaagcaaagagcttttagcaaagaagtatcacaattaaactattctagaaagctcatttgttcagcagcctagaagactgaacaccctgaggcagcactctgagaaatgaaagctgcattctggcaaaagagggtcaagactttggctggattggaggcagcaagacagtaaggagaaggacgattcatgacacatttgggaggtgggcctgataagcttttatgagtgtgactgctaattaaacttcgtgattaaaattcatgtgaaaatctaaccccaaggtgatggtattaagaggtggggcctttgggaggtgattagatcaccagggctctgtcctcataagcaagattgctgtctttatgaaagaagcttcggccaggcgcggtggctcacgcctgtaatcccagcacttagggaggatgaggcgggtggatcacctgaggtcagaagttcgagaccggcctggccaacatggtaaaccccgtccctactaaaaatacaaaaattagccgggcgtggtggcacacacctgtaatcccagctactcgggaggctgaggcaggagaatctcttgaactcgggaggtggaggttgcagtgagctgagatcgcaccattgcactacagcctgggcgacaagagcacaaaactccatctcaaaaaacaaaaagaaaagaaaagaaagacgcttgagggagcctgttagcctccgctgccaagtgaggacacagccagaaggtcctacctatgaagagcaggccctctccaaacaccaaatcttgggctttccaggttccagaactgtgagcaatacatttttgttgttcacaaattacctggcctaaagtattttgttatagcatcctgaatggactaagactatggggaaatctgaatatggtctgagtattagttaaaataaaaagttactgaattagaaaagtgaacgtaattgaaaaataagatagaataaaaaacagtatatatagtataatcttactttggtagaaaaagaatataaatatgtacatctgtatgcgtagagaaagacctagaaaggagaggactaagatttttctctgggtgttgggaaagtgaggtttttatttttttagaatgtactgcaaagcaaacactatatttttaatttttttttttagagacaaggtctcactctgtcgctcaggctcaagtgcaatggcacaatcacagctcactgcagccttgaactcctgggctcaagcaatcctcccccctcagcctcctaaagtgctgggattacaggtgaatgccaccatgccccagttaatttttttttttttttttttttttttttttttgtagagacaggatctcactttgttgcctaggctggtattgaagtcctggcctcaagcaatcctcctgccttggcctcccaaagtgctgggattacaggtgtgaaccaccatgtctggccatatattacatttttaaaagaacctatttatttatgtatttatttatttatttgagacagggtcttgctctgttacccaggctagagtgcaacagcacaatctcagctcactgcaacctccacctcctgggttcaagcaattctcctgcctcagcctcccaagtagctgagattacaggcgtgcaccaccacgaccagctaatttttgtattttcactagagacagggtttcaccatgttggccaggctgatctcaaactcctgacctcaagtgatccacctgcgtcggcctcccaaagtgttgagattacagacatgagccacagtgcctggcctaaaagaaccaatttaaagttgaaagttggaaataatttctattctgtagttttctattaaaggagctcacagacacaaaaaaagcagcagccactgggtatgatggctcatgcctgtaattccaacactttgagagggcaaggtgggaggatcacttgagcccaggagttcaagaccagcctgggtaacatgacaagactctatctctataaattatttttctttttccagacagagtctcactctgccacccaggctggagtgcaaaggcatgatctcgactcactgcaacctcttccacccaggttcaaccgattctcatgccttagcctcctgggtagctgggattacaggcctgtgccaccacgcccagctaatttttgtatttttagtagagatgggttttgccatgttggtcagactagtctcaaactcctggcctcaagtgatccgcctgcctcggcttctctacaaaaaaatttttttgaaaaaattagccaggcatagtggcccacatagtggtcctagctactcaagaggctgaggtggaaaagatcacttgagcccagaaggtcaaggctacagtgagctgtgttcacaccactgcattccagcctgggcaacagagggagactctgtctcaaaagaagaaaaagaaagaaaagaaaaaagaaaagaaaagggaagggagggggagggaagagtagagaagagagaaaagaaaagaagagaacagcaaacctcaaacgtgtagtgtacaagctggctccagatgccaagcaaggaggggaagactatctcgctcaggctggcaatctaaaggctcaataaagcactcctcttgggcgcccatcttatgttcctctcttttattctgagcagcagcctctctagatgacgggaaaatttagcctgatggatcatgatggatcatgctaaattttcccatcatctagagaggctgctcatctgcatcattcattctaagaaaacaagacaccaagcccctgccagcatccccacagtgagccaacggagcaggcagatgcaaagagcccgagaaataccaagtgctgtgcaccctgtatccacacagtaggcaaaagcaactttcataggaaggaggaaacagcacgccgagaaggctcttctttgggattacatggcaacagagattctcctggaagggtttctaactttagggcatcatcagggaagtgctgtcctgatggagctgcccaaacttaatacaaaggagctaattttcgtttgtctcaaatttaaagacagggattagggagaaggtgtaaagggcaaagggaagggcccaatccaaacagaataaggaaaggggatacattgctgctgactatactctcctctgggaggaatcccagcaaactagacagctgccagatctacctggtaaattccagtcaaccagctagagaattggagaactctctccaattcttgttcatcttcaaaactgtctgagcacccaacatatgttgcctgttacacataaacattcaacaactgaacacaaacataagtgaacaggctgaaccaactgaaggtttatggaccaagctgtataacgtttggggctaaaagagcttaacatgaaatagaatcaaatgttaatgttccattaataacatttgatgcaatatgatcaaaagactgaagctctagtacccagcacagtatctggtgtttaagaagtgctcctcaataaatatccattgaatgttaaatgatccaggatttttttcttgcatccaaaactttcagatccagtagaagatattatttaaaagtctgtgttctcacttttatgctgactttcaaagtgttttgttagagatggaaaaagatttctgggtatggaaaaatttttaaagtatcatacactgccaattcactggcctggtacaggctgtatcaatctgttctcatcagctctggttgaaaacatatgtggactacctgaatgggcctaggcttgagcacaacttatccgtccaaagcatttgtgggcccaggagacaggttttacttccactggtcacacgtgtccaaaaaaaaatgtgcaaggttggttggaagtccctggatgcctgactccccaaccactatattgggcagctcccctgatggaaaggcaggcccaggccctctctgggcagctgctcccattcatttccgtctgttccttcagtctctcctcactctatcactattttcttttttttttttttctttcttcagacaggtcttgactgtcacccaggctagagtgcagtggtgcaataatggctccctgcagccttgaactcctggtctcaagcaatcctcccacctcagcctcccgagtagctaggactacagatgtgtgccaccatgcccagctaattttttactttttgcagagacagggtctcaccatgtcacccaggctggtctagaactcctgggctcaagcaattctcctgcctcagtctgccaaagcactgggattacaggtatgagccactgcacttagccccatcactattttcacatcagtataatgttatcttgtatccctcctgtcctaacctggcccaggtttcttagaagaattatcatctggatactaaaatgtcatttatagccgcatacagaattaaggcaaaataccaggtctcctccttcttatccccaaactctattagaaagctgagtatacacatattgcctgataatttcatgtcatcttctccaaaaaccaccacaaatctctaaaaacagaaacagaaataactaaaatgatactaggcccttagcaataatacctggattgttacaagggcctcctaactcctcttagcttctagtttcctcctcaattccaatccattttctatactatccattctgtcaccatccctgtagagaaagacagaacaatagtcaaagcattttcacatgcctcccactcattccaaactcaaagtcttcaagatgacattcaagatcccagaggatctgattcagcctggtctgtctccgatgggctcctttataaacctgctgattccaatagaccacctatttccagcccatacaagccaacatcttttctgcctctgggcctttgctcatgctgcccctggttactccccaacccccagagtcctcctggattctgaaggcagcactgtgtagaagaaagggaactaaattaggagtcaaaacacctggatgccagacgtggttctgacatcaactggttgtgtgcctttgggcaggtcctacacctctctgggctcagtttcctgtctataaacagaaagattggactagttcaccctatagcccttccacctttaaaaaaaagtattcttcgattcctatatgctcgaccaaatccaatctctccttcaaagtctgcaggtcctccaagaaatttctctgagcacttcagcccacactattctgtcccctctgtgtggaatccagaacaaattacacagtgcattcattcaaccaagatttctgagcattttcttggccatgttatgatagcaaagccttggtaataaacataaaaccagttaggacccaggctgtagttatcacctgtacctccctttcctctccactatttttacccaagtgaagtcatgaacagcaaatgaatgcaaaagataccatttagtcatttatttaacaaatatttaaagaaaaccttccatgtcctattctaaaaagtaaagatatcagtaaacaaatggatcaagtccctaacttcatggagtttatttatttgggaaagcagacaggaaaaacacagaaatatgtaatataattttaggaagaaaaagaaaggaggggattaaagagtgactcggagcagttttacataggatgggcagagaaggcctccctgaggtggcacactcgagcccacactcaaatgaactgggtgacaaaccagcaatattcaaggagaagagcatcctaggagcaggcaaaggccatgagacagaagagatgggaggaaggcaggagcagatgggagagctggggcttagaccacacaagaacttggtagtaaatgtgcattgtacttctaagtgtgatagcattccatatgagggtaaaaaatatatatattctcattgctatgtggagaagagactgcaaagacaggagcagaggagccaggaccagctgaggatggctattctgaaccagtcgagggcttggctggtcacccaaactaggtcatttcctggctctccagcttataagctgtgtgagctcaagaaagtccatctcttgtctcagtttctacacctttaagcaaggataataaaaatacctatattataaggttgtctggaaggctagattagtgcacataaaacccttacaacagcctctggcagccagtaaacattccataaatgctagtacttcaaagccagggaatcacctaagaaaagtgaagacagagacaagaaacaggctgaagactgagcccttgggcgctccaaaagctccaaaggcctccatttggcccaagatttgccataagcctgcacgtcctaaaccttgtctggggctccaaaccccctgtatgtatcaataactcaaaatttagagcttgatgatgtactgctttatatcattctttaggtaacaattatatgttctaagttcaggttatcactttccctcagttgtattgtatatctactaccaggcttggcatagggttagataaacactaacgtgtttttttgtttgtttgtttgtttgtttgtttttttgagacagagtctccctctctcgcccaggctggagtgcagtggcgcgatctcggctcactgcaagctccgcctcccgggttcacgccattctcctgcctcagcctcccgagtagctgggactacaggcgcccgccatcgcgcccggctaattttttgtattttttagtagagacggggtttcaccatgttagccaggatggtctcaatctcctgacctcgtgatccacccgcctcggcctcccaaagtgctgggattacaggcgtgagccaccgcgcccggccacgtgttttgcaaatactcattcatggattatatcatgtatatttcaaagaaatcaatgtaaggcactatacttccttttaaaacaaagaaccatcttctcttcaaggaataatgtgaattataagttatatcctcagcactgccccactacccccactaccctatcagtcccatcttggcagagacaggcatgctgaccaaagaagttacaccatctgccatgccattttcccacctgacttcctgtccacatgctttgtgaacaaagttttctgtctcttctttcctggaaatttctcaagctgtaaaaacctcccatacctagcaacatgtcacacctgcccctgtccccagaattccccatggcccttaaaaaagcctaaacaatgaagccaaaatattcccagaaaaacaggagcatcaaaacttaggaagaaaagagggaaagaaaatgggcataacccaaataaacacctagagaatcatccagcagggttcttcccgccaaggtacaggaatctcagtgccttcaactagttactatgaatatttataaaatgaccttaggaagtcctagccagaacaatcaagcaagagaaagaaataaagggcatccaaattggaaaacaggaagtcaaactatctctgtttgctaatgatatgattgtacacttagaaaaccctaaaagatgcctagatcctccaaaagactcctagatttgataaattcagtaaagtctcaggttacaaaatcaacgtacacaaatcagtagcactgctatataccaacaaccaccaagatgagaatcaaatcaataactcaatcctttttaataccttcaaaaacaaataaaatacctagtaatatacttaactaagaaggtgaaagagcactacaaggagaactacaaaacgctgctgaaagaaaccacaggtgacacaaacaaatagaaatacaccccatgctcatgaaatcaaagaatcaatatcatgaaaatgagcatactacccaaagcaatctacagattcaatgcaattcctatccaaatactaacatcattttcgaaaatattagaaaaaacaattctaaaattcatatggaaccaaaaaggagcccaaatagccaaagcaatcctgagcaaaaagaagaaatctgtagacatcacgttacctgacttatactgcaaggctatagtaacaaaacagcaatggtactggtataaatgtagatacacagaccagtgaaacagaatagagaacccagaaataagccaaatacttacaaccaactaaccttcaacaaagcaaacaaaaacataaactgggaaaagataccctattcaataaatggtgctgggaaaactggctagccacacgcagaagaatgaaactggatccctatcactcaccatatacaaaaattaactcgagatggatcaaagatttagatctaagacatgaaaccataaaaattctaaaagaaaacttaggaaaaactcttctggacattgggtgagacaaagaatttatgactaagaccccaaaagcgaatgtaacaacaaaaataaataaataaatgggaactaattaaactaaaaggcttctgcacagcaaaagaaataaccattaaacagacaacccgcagaatgggagaaaatatttgcaaattatgcatctgacaaacaacaaatacctagaatctgcaaggaactcaaataattcagcaagaaaaaaacactcccatcaaaaaccgagcaaatgatatgaataaacatttctgaaaagaagatatacaaatagccacgaaatatatgaaaaaaatgctcaacataacaaatcatcagggagatgcaaattaaaaccacaatgaaatactctaccttactccagccagactagccattactaaaaagtcaaaaaacaatagatcttgacatggatgtggtgaaaagcaaatgcttatacactgctggtgggaatataaattagtacaacctctatggaaaacagtatggagatttctcaaataactaaaaatagatctaccattcaatccagcaattgcactactgggtatctactcaaaggatgagtcattatatcaaaaagatacttgcacaaatatgtttatcgcagcacaattcacaacagtaaagatacggaaccaacctaagtgcccatcaaccaatgagtgattaaaaaatgtggtatgtatacaccatggaatactactcagccataaaaaaagaatgaaataatgtcttttgcagcaacttggatggagctggaggccattattctaagtgaagtaacacaggaatgcaaaaccaaatactgtatgttctcacttataggtgggagctaagctatgggtatgcaaaggcatatcgagtggtataatggattatggagacacagaagggggaggaagggagggagggaggggagatgaagggttacaaagactacatattgggtaccatgtacactactcaggtgactggcacactaaaatttcagacacaattcatccatataatcaaaaaccacttgtaccacaaaagctattgaaataaaaaatacatatttttaaaatataataataatgaaacatttaaaaataaatacataaataaaatgacctcaagtgataagggtttccaacagaacaaaggtccaagtcagtgaggggaaaaagattaactttttcactctttttttttttttttttttttttttgagacagggtctcactctgtcatccaggctggaggtcagtgccacagtctcgactcactgcaatctcaacctcgggtgatcacctcaggtgatcctcccatctcagcctcctgagtagctaggaccacaggtgtgtgccactgtgcctggctaatttttctaatttttgtagagataggggtttaccatgttgcccaggctggtctcaaactcctgagctcaagagatccacctgccatgggctcccagagtgctgggattacaggtgagtgccacagtgcctggccaactttttcacttatttattcagtttccacagaactatctggtcttctgtttttcttccctgtcctacccacccatgctcccacacgcctagcctgggtgataagccgcagaaaataacgctgacccaccaggaccacagctcttgatgtggcttcaaccaagtctgagcctcatatcctgagatctaccccagccctccagggaccagaaatagtgacaaatacatgggaactatgtaggcgactcaaatgtagacagagctgggcacatcatactgctcccaaattggttttcttgaacaaacctaacctgaaatagacaaaggctgctagatgttattttgccaataccttttggcagagctatttctagctaattctgatcactgagctactcatggaggttttaaaaatggtccatctttaaacctaccattttgggaggcaaaagtgggaggattgcttgagcctgggagttcgagacctgtctgggcaacatagggggaccccgtctctaaaaataagtaagtaaattaattaattaaaaaaaattttaaatggccctctgaaacaagatataaagtggcctctacccacgccccatgactcttaacgccactttctttttttttttttttttgagaccgagtcttgctctgtcacccaggctggagtgcagtggcacgatctcggctcactgcaagctccacctctcagcctccccagcagctgggactacaggcacacgctgccacgcctggctaatttttttgtatttttagtagagaaggggtttcaccatattagccaggatggtctctatctcctgaccttgagatccgctcgcctcggcctcctaaagtgctgggattacaggcgtcagccactgcgcccggcctgcctcttacgccacttcctatgcaaacactgtggtcctgagtgctattctaattcaaaagagtgacctgtcaatgtacaaatgggggaaaaatagcaaaacggaatcctcacaactgatattgctgattaactggacaagaaggattcaattaatatactttgaccttaagtgccatttttccatgttaacccacagcaccaaatactcatttgcaagttgggttttctttatctccaggtatctatgtacagattcgagtgactactgaaaagtacaaagctttgattcccctcccatacaattatactattttcaagagaatttccattcccctgggacttggacccagtagaagaagccttttgggtctaagtacttagaatgcactcatccctggctcaagaggcaagaccagactttcaagaaaagcttctccaggcagtcctggagaaagacagctattgagtggcacttcctaattcaaggggatattatgctaactagagttcccggcaacagtaaatgtaatccaacatgactaatagaaaaaataactgactaggccctgtttactcactagaaaatatatccccacatgatgagccttaacagaggtcatctcagcttccagagaccagagtgttgtaaaaacagttgcttcccaacagcaatatttggatcaggaggtacccaacactcatatccaaaactaatttcccatccaatttcttttgttgttgttgttattttcactcaggggctcactctgttgctcaggctggagtgtagtgacacaatctcggctccctacagccttgacctcccaggatcaagcaatcctcccatctcagcccaccgtttagctgggaccacagacacgcaccgccacgctcggctaatttttgtatttttttcataaggacagagtctcactgtgttgcccaggcaggtctcaaactcctggcttcaagcaatcctcccaatttggcctcccaaagtgctgggattacaggtgttagccaccaggcctggcctccatctaatttcttaacttcatccactcattgattcatcaaacccctaacattaagcatattcactgaagaaaggtaataagagaataaacagatgcccgtacacaccccagtgctttttccgcaggagatattcaaaaactataggacacaagaaaggaaaagtatataaatgatagtgatacagagcacttcccagagaccagtgtctgacagtctcaggacactgactctgattaaaggcactttttaccccactctagttagccgcctccaaaaggaagaatggaacaagacggaaaaaatttaaaaaatctaaattcaaacttgtccttggctaaatttacatccaagatcccaacttcacatcaaagaaagaaaaaagccacccaaagtgacccctgcctactcaaaggagtttccaaaacattaacaaacagggacaaattcccagcatattctaattactatgaccttttatcattaagagtcccataaaaaggggcttatttctaatgctactaacaaagggttaagcagattatttctatcatatttgcatggagatcctaaattccagtttaaacaaatgattcccagacttctagataggccttaattgggctaatctgttacttttagtgcaatctcgcaaaggctggattcttcttaagcccttaaaggacttgagtaaaattcttttgatggtaatttttttaaaagatcatctccagagtttacatatattccacaattacttatgctgatagaaaaaaatatatatattttactccaaaaggctccttccagtttgaaagctctaattgccaacatatctgatatgaacttcctgcataaaacaaaacacaaagcaacaagtataatcataggtctaaaaagagagacttgttaaggaaaacagagaaagctcagcttgtttagccagaggaagggaaggaaaggatgggtacagatgggacagtctgtacatttggtagctgcctttggagtccaggaaagacaatttgttcactctgtgaacatgtgtgcattgaagagggacaggaaaacagtaaaagtaggaaacattaaaagaaaagctaactacaaggagataatctgtgatcatcaatctggaaaccttccttagaaagtgtttcccagggaaattgtgagatctctttaagagagattaaatctcttcagaaagatttaaggatatttggaggtggaggaggtcaaaatagtcaaagttctaccatactaggagattacatctgagtatcaaagggatattccagtcctggggaattgtccaaatgccatccccactaaaaaataatttagactatttttaaagaggatattgcagccctatttttctttttctttttttttcttttattttgagacggagtctcgctctgtcgcccaggctggagtgcagtggcgcgatctcggctcactgcaacctccgcctcccgggttcacgccattctcctgcctcagcctccccagcagctgggactacaggtgcccgccaccacgcccagctaattttttgtatttttagtagagacggggtttcaccgtgttagccaggatggtctcgacctcctgaccttgtgatccgcctgcctcggcctcccaaagtgctgggattacaggcgtgagccaccgcacccgacctgcagtcctatttttctaagctcttagctatcttagaaaacctaaatcacctgtttaataaattattaaaatgacaagtaccaaatacaaaaacattaactatgtaagcaatgcatcaaaaatgcaaccaaacatttctaacatttaaataagggcattgccaaagtctcttcttgaggccccaactctcaaaactaggttcaagagcattctcccgggaagacataccaaatgatccccaaccaacaatgagctttgccattctctggaggaatgaccacataacctataaccagaggctacagagaaaataaaatgactttcaggtgacacaaaatacaaactgggagaaggaaccaaggtgctaatcagggtgtgaccacctctatctggccctaagggattaccctgatctagaagaactaggaaaactgagctcagagatctctcaaacatcaaattccaggaacttctgaataaatggcaaagctggaactttaacccaggtttttgtactccaaatcccctacactaagaggggtcacattcctcagaggtccaaaacccaaactgagtcatatcctgacccatgtagaggtcctggtgataatttcacctatcaaaaccccattcagtaaggcaagctctccaaggtgtgagaggctcttaaaggtaaaaatgggtgtggagaaccgagatcatattttgatttcgcattttttatttgacaaaaaaccatgggtgactctaacattaattaaaagaaaacttctttagttgacaaacatcacttttctgcctgtcaagctgcccctccttagtgagccctcctgctaggggatattccttggccaaacaaccaagtctccagagcactagcaagttcagaggaaacggcgtacaggttgcacaagaaatagcaagaaatccagattgtattcaaagcggcagactaattctagtaaaatgtctccacccactgctgcccttcctgagcccattatctgccgagaatcaaagggcctggctataaatgtgggtgtccaatgtccttataagctccataagctgtatacatgaacaatacgattaactggtaagaaatgtggaggggtaggaagacctttgcacatctctaaatcctggctttcctatcccttctaaatccccacgcaggaactctacaaaggcctcctgtttttcctccataacacaaagtgaaataaatgtatattttatgttaatctttctcataattaagaaaggtaatctaaattcacttttaccttactagtaccaagttttaaaattcagctttttttttttttttttttttttgagacagggtctcactctgtcactcaggctgcagtgcagtggcatgatcatggcttactgcagcctcaacctcctgggctcaagtgatcgatcctcccaccttagcctcctgaatagttgggaccacaggcacatgccaacatgcatgattaatttttgtattttttgtagagacagggtttcaccatgttgcccaggctggtctccaactcctgagctcaagcaatctgcctgcctctgcctcccaaaatgctgggattacaggtgtgagccacagcacctggccaaaattcagcatttttaagaaataagagaatatgagaggaaaaggcacatcaacttacctaagatgtttagggcgaggaaaagcttttaaacaaattacaacattgatctacctctcagggtagtcatgaaagaaaaaaccaaagcattgcgaaacatgggggaacataaaggacaaaccagcagtggcattgatccacatacacattccatttcagcgtatgcctggtaagattcagctcttttctgatccagagcagccccgtggtcactccaactagctctttacccagtgaaccaagctactcgctgcagggtacagtaagtgagacaggaattgaaacacccagatatcctggctacatttcctttttgaacctcctcattaggaattatgacttgcacatgacttgtgatgagcatgtcacattcctgtacatagatgtcaccttaatcttctaaaatcactgctttacccatagctccttttctcaaaaatctttaaaacctaaacaatgtctacaggataaagttccagcccttgagccagaattcaacctgaccacagttcggcttccactggacctcccactgctctttggagaaggcagctgtgaaagcacccatgttagtctgagagccaggcattggaattccagctctgccactttaccacttgtgtcatcccaagccagttacgtatctttttgatcttgtctttttaaaaacaagaattccctcatctttaaaacaagagcaacaatacctatgtcacaacactgaaggatgaaagagagagctggcaggtggcatagagcagatgctattacttttctctctaggtccagtccaaatggtctgctctccattctcttgaaagctttccccagcaactctccaccagtttcagaagcatactttgcttcaaggctctcccctcttctatgaaaccgccctgcctcagaatcattttctccttgagctttataattcttagattctaagccaagtttgtccaacctgcggcccatgggccgcccaggacggctctgagtgtggcccaacacaaattcgtaaacttttaaaaatattatgattttttatgcgatttattttaagctcatcagctatccttagagtcagtgtattttacatgcggccccaggcgattcttcttccagtgtgaccccgggaagccaaaagattggacattcctgttctaagccaattgatctgaaattatccttcactcaaatgtcacttctctttccccaaggagtccacaaactcaagaccaaggatttccctaattaccaagccaatccaatctaagcgttcagtaaaaaaatacttttaaggtaagagttgccttggagttgtctaccaaaatgggtgcccttctggcccaattaggggataacatttcccatacatacacttgaacaatttttcttccccctatcttggggagtttttccaaaggtaatatttgccagatagcctgggcccagtggctcacgcctgtaattccagcactttgggaggcccaggcgggtggatcacctcaaatcaggactttgagaccagcctggccaacatggggaaccccatctctactaaaaatacaaaaattagccagacgtagtggcaggcgcctataatcccagctactcgggaggctgaggcaggagaattgcttgaacccaggaggcgggggttgcagtgagccgagattgcgccactgcactccagggacagagagagactccgtctcgaaaaaaaaaaagaaaaaaattttttaaataaaaaatatatgccagataaataaaaaggagggttacatctatgttagtcacctaggaactctctgccagaccagcagaatttaagaagccttcacttcatgcattcaacaggctcttcttgagttctggccttgtgcggtccttaattcagcaagggagataggctgtgaacaattcagtctctatcttggattagctttctggaccccagattacgtctaaccttttagaaacccctaattctggcaaaaaaaaatcaattaagggattcaccttctgaaaaatattaaaacaaaacaatgcagccctttgggttttaaccctgtggccccatcccaaaatggccagttgcagtgtgtgcagctaagaggtagctgaaaacagtcttgcagatgggataatgacctctttgccattcccaagaccctgctatccaaacagcagaaacacctggttggtaataaaagcaagagctggactaaggctgtactaaggcaaattttctcacttaatgaagaagttattttattcatattaatcatcaactactttcatataaagatcccaggaaaatgcaataagccctctttagaaacacttgaaaacattgtctcttgaactctactcagttactaaattattggataacgtgccataaacgttgactagagtgtggaccctttaatacttagtgcgtgtctgcacaagggcaaaaagtgaaccatccacaaataaacatagtttaacttgttgcagtaatagcatgcaaagttaattttcctttgtttgagttccgtgtgtctgtgtgtgttgtgcgtgtgtatgtgtgtgtgtgtgtgcgcgcgcgcgcgcgcgttcttcaaggagcctgcatacaagctgcaacagctccaggtaggagctcgaatgccgccaccgagaggcaaggcggtgcgcagagccagctcccaggacgtcccgagatcgggtctccgctcggcaccaggcagctcttcaccgccggactctggccgcgaggttccccacccccaaccgcgcggcccccgccgggccggaaagcagagccggcggctactgaccgcccgggagggcggaccccaccagccccgctcctctgcgcctgcggcggcccccacgcgcgtactcacggagctggacaccgctgccggggccgggagtcgggagcagagggaaaagggctgggagggcaggggcgggaccgggcgcgcacgcgggaaccggggccacccggcccggaggcgcttacctctgcgttccccagccgggccgggcgcggcgcctggatggggtctcgccgggagccgcgcggcccggaggaggagccgctcctgcagagagggcgggcggcgggcaggcatccgcgccccgggctgcggccgggctgcagggagagagaggggagggagcgcagatttgagtggagggggcgtggaggatgtgcgcctccacccaagacagagagggtgggctgctggagcccggcggaggggagcgctcggaggcgccggaggcagcgagaaagccgcgccgagagtgtgcgagggagggtgggggacaggggtgagggaggcgggggccgggggcagcagggaggagaagttggcccccaaactggacggccctcacctcctcaccatccgaccaagagttgtctgggtctggagcaaagcacaacggggtctgaaactttatgtcattttctcatacacacgtgacccccctggagtccagatggtttcaatcactggaggaaaaaagcggctcttctggtatgcgtgaaaagccggagctgggagagtctgggaaaagctgcctgcaccgcccgccggccttcaaacaaaccgatgagctctttcccttctcccagttctcgggcctcgggggagccctacaaaacccaaatgaaattcaaagaagctacttttggtactgcagcagcagcagaactcccaaagcactagggttccaaggagcctggtctcaaccgaaagctccaaaagggattctgaaattttactttaaatactccactggtttgcaaaaacaaaaactagaaaagggtgccatttaataataaagcaatggaataacagcactgagaatctgtgatttattagtggaatttgaaggaaatcattagcccagtataacaatcaacttggaaaagaaaaatgtaaattacttaagatccaaacccatacttagtgagatgttaggaaatcgtgtaatccattttttactcacgtaaatcactgtaaataaaatttgataatagaaatgcacaacagcagcaatgaaaattgacttttgaagtttcagttttacattgactttacaaatttacatttctaaggaaccagtgtgtatgaacataagcaggctccaaggccaggacatgttccaaaatccaagccagttcaattgtcacatatcctaaagaggtatttactcagctgcagggcaagcatcaaaaataatgagtttaagatacatcctgaggccgggcgcggtggctcaggcctgtaatcccagcactttggaggccaaggtgggcggatcacttcaggtcaagagttcaagaccagcctggccaacatggtgaaaccccatctctactaaaaatacgaaagttagcaggagtggtggcaggcgcctgtaatctcagctactagggagccttgaggcaggagaatcccttgaacccaggaggcagagattgcagtaagccaagatcgcaccactgcattccagcctgggcaacagagtgagactccgtctaaaaaaaaaaaaaaaaagaaaaaaaaagatacatcctggaaataatttaacttggtcaagatcgaacacaagtaatggcaagaaccaaactgataaagtctactgttcctttgccaaaaaaggatattacacaggaattactagtattaactctttgtctccaaaatactgaggccaaaggacagtttggcctttctagcagaaggccttatatgcggtgtgatgcagtctgcgcatgaaaaataaatcaattcctcgttgagttgcttctacattaggaaagcccaagatttcagctgttgttgaggcacattgaaaacacaaaggccaaaaatcagcacaggttttactccaaaaatcagaacagttttactttaatcagaacaagtttttctccaaactcacaatctaagtgagtttctactctagttcactgaagtgcttgaacacctcaggagacctgggccatatttggatgaacttagccctctccagtcttttccaatctctccaatctcaaattaggatggttctgccccaaacgtggaacaagagaactcatgaatgtaaaggcaagccacagaatttagccagcctccaggtaaattctacctgcagctctctgagctctgtaaggaggttcttaagtctcccactttcaaaactattagaacctctactactaaagtcccgtttttcttgtaacatctctaaggaaagacaactcaacagacagcatcaagattttctctaatcagacccaggacaataattattttcatcattggcagctgctgctgctgcctcttatatgtgctgaagcaatgtaagagggcaataattagatataaatacttgttctttttgttggccaattccattgtaagttatgcatggaactgttttaattcttaggaaaaaaacttcattagatctgctctctcagaaagaaaagttaacatcccttaaattgtctaaatatagtctaaatatagccttgagtctaaacttcatatatgtgactattagttcatcttaatactggccaaatatttattagagacactgacatcagaaatggtgttaatgctatattttaaatagtagtaatttagtaatttgcgttaacgtaatgttcacatcacttgacaaacaaggtcgactatgtataagagatggcaagctctttgaggacagcaacctagcctgtcttgctaataattacatcctatctgcctagcacagtgcccagcatgaaataagcgcacagtaaatatatgctgtctgaataaatgaaagataaataaaaacactcctcataaggttacaatcctgttgtagagacatgtgacttataaacaacagaatgaaatcgccatggaaggatactagcaacaaaaaagaggaagggatcattagcattagccagctttggactttaatcacagcatatattgagaaatgtgcagagactgctgaaaataggaagcgcttgtaggaggaatttggtaaatttactgcctaatttaggggtctgagatatactttcccatgttccattattcagtcccatcaacacagagccaagacaagatttgagcataaacatcctggctctaatttggatagttatgaatactgttcctttcatcctctctcatacgtctcctccacccgcaagccatttcctctgtacggtcttctgtcagtctaatgaaagtttcctaatctttagaagcagtagctttggttctctttgtgcagagaagtacaatatgccctgattacatggttatattccatacagatgcctggcaacacatcttgtagctaagggtctgtttaatattttaaccttgagagccttataattcaactactttgttatataccaaaatagaacttgacatcacaaagatgagctttacttccttttgctattttaaatcctgcacttaagcatggtgagttgtctgggttttctggttcatggattttgctttggcatgttttgttttttcctttgaaggacagaagggttaagattttctaggaagattttcaggtttgcaggtctagcactcacgaaacaatgatttcttcctaggtactctgcctgtaatattatatgtattcattaaaggggcagtgagggttgggttcagtggctcattcctataatgccattattttgggaagtcaaggcaggaggacctcttgagctcacgagtttgagaccagcctgagcaacatagtgagaccccagtctttaaaaaaaaaaaaaaattagctgagcatggtggtttatgtacacctctagtcccagctactcaagacattgaggtgggaggattgcttgagcccaggaggtcctggctccagtgaattatgattgcaccactgcacttcagcctgggcggcaaagtgagaccctgtctcaaagaaaaggtattggggctgtggggccttatttatgcttcatgatccaaacaaccagttttctctaaagcagacaactgggaaaggtggttagcctagatgactttaagtgttctaggccgggcgccgtggctcatgccagtaatcccagcactttgggaggccgaggagggcagatcacaaggtcaggagatggagaccatcctggctaagacggtgaaacctcgtctctactaaagatacaaaaaattagccgggcgtggtggtgggcacctgtagtcccagctacttgggaggctgaggcaggagaatggcgtgaatccaggaggcagagcttgcagtgagcccagatcgcgccactgcactccagcctgggctacagagtgagactcagtctcaaagaaaaaaaaaaaaaactactaaattttctaaattgcactgagtaggaagcccagaaaccaaaatttgcatgcaaaaatttttgacactgtgatttttttttttaattttactattcttattttttttgagaaagagtctctgttgcccaggctggagtgcagtggcacaatcagagctcactgcagcctcccaccttagcctccccagtggctgggactacaagcacataccacaacacatggctaatcttttaaaatagagatttttaaaaatctctattctatagagataggagtctcactgtgttgcccaggctggtctcaaactcctggcttcaagtgatcctcccacttcagcctcccaaagtgctgggattatagacataagccaccacacctagctgacattttgacctaaaaaaaattttttatatgtaggtaagatatacaccaggtaaaaacttcagaaacagtttaaaaatatataaatgatccccaatatatggtggttcaacttacaatcttttgactttaccatggtgcaaaaccaatattccttcagtagaaagcatacgttgagtccccatacagcattctgtttttcagtttcggtacagtattcaataaattacatgagatattcaacactttattattttatttagatctacacagaattaaaggagaaaaataaatgtagtactcctggttaatatcattaacataagttacagggttattaatcaagatcttaagagaagaattaagatatactataggccgggcatggtggctcatacctgtaatcctagcactttgataggctgagacaggaggatcgtttgagcccaagagttcaagaccagcctgggcaacatagcaagaccccatctctatattatactaaagtacatatatatactttaatcttgtcaagctggtaaatctcatttggatttcaagtattactgaggttttaatataaaattaaaaataaattattcattttcttaaaatatataaggaataagtaaactgaattgtgttacttatgtcttttttatagtagattatatttcctgccttggataccatgcagtgccttttgttccctccctactaagtgtacagaagacaggatacatccaatcaaagttctctttctatatcagctcacaaaaaggttcactccaatccatttatttgattttatcctgctatgttgtttggggttttgttccagatagcaagctgtctaatactcatttagataaagtacaggggctcatgcctgtaatcccagcactttgggaggccaaggtgggcctatcacctgaggtcaggagttcaagaccagcctggccaacatggtgaaaccccgtctcttctaaaaaatacaaaaattagccaagcatggtagcgagcacctgtaatcccagctacttgggaagctaagacagggagaattgcttgaactccggaggcagaggttgcagtgagccaagattgtgccactgcacatcagcctgggcgacagagcaagattccgtctcaaaaaaaaaaaaaaagaaagaaagaaaagaaaagaaagtaataaggcagcttgactgctgatgctgggcaggctggatctgagagtaaatgagaggagatgtcaggtggcctttagacggacaggagacaagctcagaaaggctcatccaacctggatggtcccctcactcctctgtcttgctaagtcatccttcttccttctctcatgggcttgaagatactttttttttttttttttttttgagacggactctcactctgttgcccaggctggagtgcagtggtgcgatctcggctcactgcaagctccacctcccgggttcatgccattctcctgccttagcctcccgagtagctgggactacaggtgcccaccaccatgcccagctaattttttttgtatttttagtagaaacagggtttcaccatgttagccaggatggtctcaatctcctgaccttgtgatccacccgccttggcctcccaaagtgctgggattacaggcgtgagccatcgtgcccggcctttttttttttttaaacactagtcaaatgaagcagtgggagcagagaaggaacaaagaaatctgtaactggttgtcatcaattagttgtaaacatcactgcacttgaaccagcctgaagataattttttattggaagaaattaaagtctaaaaatttactcatttgaaacactagttaccaatctttgttctaatggtatcagtcttagatttaatgaattatctccagataaaataatgatctatatttgtcactgaattcactgaattttacccaacatgcatccctgaaaccagacttgtgaaatttaatatcattttgtcattctccatcttactggcaaaacagaaatccatagttcccccccaaaaaaatcacgattgtatctgtagctccttattcatttgtttattcattcaataagcatttattaaacatcacaaaactatttttgacactggggggaataaaagtaataagttgtgtaagcaaatttaaaatctagtgataaaggcattaataaacaactactcaaaaataatagcatacaagagataaagaggaggaaatatgggaatttgcagaactagtagagattcttactagaatttagagaaagagggttggaactgaaccttcaatgattgtcagaatttctatttcagtcattagaaaagaaggggagaaaattttaagccaaaggaattgcctaagccatgaaaatgagaaaccagctgtaagaacagtgactggtcctcatttgactgaagtaggaagttaaaaaggtaaattaagtgggaatcagtttggtggttcctcaaaaagttaaacatagaattaccatgtgaccagcaattccactcctgggtatatacccaaaagaactgaaaacaattgttcaactacttgtacacaaaagttcatagcagcactatatacaggaccaaaaggtagaaataatcatgtccatcaacaattgaatgaattttttttttttttttggagacagagtctcgctcagtcgtccaggctggagtgcaatggcgcgatctcagctcactgcaacctccacctcctgggttcaagcagttctcctgtctcagcctcccaaatagctgggattataggcacctgccatcatgaccaactaatttttgtatttttgtagagatggggtttcaccatgttggccaagctggtcttgaaatcctgacctcaggtggcctcagcctcccaaagtgctgggattacaggtgtgagccaccgtgcccagccatgaatggattttttaaatgtggtgtatctatacagtggaatattatttgaccataaaaaggaataacattctgatacatgcaatgtgagtgagacttgaaaacattatgctaagtgaaagaagccagacccagaaagtcacatattgtatgattccatcaatccacagagacagaagataaatggttgccagggctccgggggagaaagaaatgggaggtaactgcttagtgggtatgggagctccttgagagtggtgaaaatgttttggaactagaagtgatgattgcacaatattgtgactataattaatgtcactgaattatacactttaaaatggtttttatgttgtgtaaatttcacctcaaacattttttaaaaaggtagactcactaatgctcactgttatacttcccagtccacagaagtctaccgttccagtcactgtgcagttaggcagggccatgtgactgtccaacccttgtctagccaacaggctgtgagcagaagtgacacatgtcacttccaggccaaagcattgaagaaggggtaagagatgtccatgcctctcttctctgccacataaacccaaagccatgtgagactgtagcggaccggatccctgaataaaccaatacctccctactgatccatgctggccatgctggatatgtatgaaatatcctcattgtcttaagccactgaaatgtgagaagctgttattgcagcataagcttagctcctcctgactgatacaggatcagatctaggaaggatatgaaggcaatatgaaggaatttgaatttgattctgaaggatgtggagagacaatatttttgagaagagtgacatgatgtgcatttgaggaaaataactctagaaacaaaagtagctcttaacctttggtgcatgtcaaaaatcacccaaagagaactgtagtcatcttccaattcctttataaattctttaaagaataaaatatttgtcctctggagaaaaaaaaatcacccgagaagcttttcaaaatgcaatgctctggtccaagacatctccagatatcctgaatcagagtctctatgctaggtacatatgattgaaaaaaaaattatgggaaattctagactagaggttagaggcaaggaggagataccaacttcagtcagagatgaccaaattcacatgcttagtgaattcaaataagcattctaataaaataatggaacgataaatgcttagggagtttcgattgaaatagtaagttatgaaaaggttagtcacattaacatttgtacagtcagagttattactttgaacatttaggtaccaatagaatggtggtggtagttttcatgcatctactctattgctaactaagcagcagcctaccccaacatttccattatgctggggaacatggttgacataccacagacaaaggacagagccatcttcagtctcctagaaggtcaaactcttacatctcctttccttctttgcttcctttttccttttcttttaggataattggcattctatgctcttcttaattccttcctcctaggtactcatcagtcaactttcaactaatcaagacttgaagagccaaaatatttaagagctcaaaaagcctaggttacagatgcactggaagctgtcactttgaactgtgtgtgtgtgtgtgtgtgtgtgtgtgtgtgtgtgtgtagtttttactaccaaatgtgatttattatatgtaattgctaagagcctcagctttccagaatagagatttcaatactgtgaagaaataaatcattttctgacaataattcagtttgtgttgcaaaatgcatcttcagagcatctcaagataaagtgatctccaataaacagcactaaagctgcctgacagaaaaactatcttcatttctaaaattgacaagccttgaagcaggaggatagcttgaagctaggagttcgaggtcacagtggctatggtcacgcatgttatctcctagaggtagcaagacttcgtctctaaaaaataataaataaaactgacaggcttcactacaaacctcctcctaatactgaatactgctcaacaatccttttattcctagtgatttcgatcctcttcttgttccccacagcaactgtcccaagcctgtctcttcccaaaacttccaactactcactctcaggaggtaaccttgccttcaccactgagaaaggagaaatgtaaattccctcaactttcccttaccatgtccaaatgtatcttcattcccccatctcctgtctcagaagcatgcttactctacttattttgaagaacgacccttacccatgttgaatctcctgtttccttcatctcatgtcttcctgtttcctgttcttccccttcatttttgtgagtatctcctccagtggttttctgtgaaaggctgcagaggaggtaaatttttttttaccagctgggaaatataatgtatatatttttatgtctttggaagcttgtaggatattttcctgaaaattcatagtgatgtgccttagtatgggtactttttcaaacatcgttctaaggcacttgtgggcctttttaatctggaggctcatgttctatagttccagtaaatgttcctgtactgttcctttaataatttcatcccatatattttctcaaatttctctttctacaactcctgtgacttctatgttggacctctttggttgatctcctaattgtccatcttactgtctttttgttctactgtatgggaaattttgtaaattttttcttctgattcttctatcaatttttaaaatttcaactatgattttttaatttccaaatgctctgtcttgttctttttgtttgtttgtttttgagacagtctcactctgtcacccaggctggagtgtagtggcatgatctcggcccactgcaacctctgcctcctgggttcaagtgattcttgtgcctcagcctcctgagtagctgggattaacaagcgcctgccatcacagttggctggctactttttgtatttttagtagagacaggatttcaccacgttggccaggctggtcttgcacttctgacctcaagtgaccgatccacccacctcagcctcccaaagcgctgggattacaggcgtgagccagcatgcccggccagtcttgttcttgttgttccttttctctagagcatcttgagcttcttacttaacttctctattctcttaatatctctatcaactcctgtctctatgaccactctttttcactggccttcatttactatctccttctctgtatactctttaattggatttttttttcttggctctcttctacacagcccatcctggacatcttatctacttgcatggtttcaattcaatttagctgatattgccaaactattatctctagctccgacttctctcttttaatttctagacctgaacttccaactaccttgtggatatctgcacctagatgttccagacacctcaaactttacattacattgctggcttctggcatcctatgctccaatctcataaacaacttgttatttcccagaaaatattatgaaaggtaacatctctgataggcccaactcaaatgtcacctttttaataaagccttctccgacttcttcctactccttgggagaatggattactctctcccttggcacccaaggctcacttcatagcccataaccattgttcataagtattgctcaccatgagccaatctgctgactgccagattgtgagcctcttgaaagcatgggttatttatctatcagtataagttccatctttaacctctagcaaatggctgttactcaataaatagctgttgaattacaataatttcaggtgaacatacagtataaatatttgactatgtaataattaattaatcatagaatgtaaccagaaacctaacccactagaaaaatattatgtaagtttcaaaatgcatctatggttatttttaattttaaaagattatcattttttggttgggcactgtggttcatgcctgtgatcccagcactttgggaggccaaggtgagtggactgcttgagcccagcagttggagatcagcctaggcaacacagcagggccctgtctctagaaaaaatacaaaaattagccaggaatagtggtgcatgcctgtgatcccagctacttgggaggctgaggtggaaggatctcttgagcctagaaggttgagactgtagtaagctgtgattgcaccactgcactccagcctggacgacagagtgagagtctgtctcaatcaatcaaataatttttaaatattatttttaaaataaacattcccaagcttatacaaaggcgcattcttcatagtaacttgcacagagttacttgcacagaattcaaaaagctaattcagttttaaatcatctgctcacccagatgggtacctgaacagctcttagaatacagaacacattttgttgttgttttcatttgggataactacaaataaaaccaaagaaaaggcaaaaagagatctctttagaatatatgacccatataaaaatattaatagtggttagccaacaagcattctgataaatttcttttccaaaaatgtcaagtgattaaagagtgaagaaaagaaagacacttctgaactcttaactagagcactgctactaagggcattatgaagctgaatgaagaatgttcattcctatgcagggattaagtgtcattaggggctttttgttttctttagtttggtttgattttctttttcaaactaagccctaatgccaaatcttacattttctttttctttttcttgttgaactgatgctatgttaagatataagcacaaacatctcataagtgttttaaaaccatccaattgtttgagaaggcatacgtgctgggcctatgaagccaaaacattagagctaggaaatttgatgaagataataattgcttacagaccagcttgttttaacttgctgaacaaagaatacaattttataccacattttcatcagaagctttttctctacataatcactactgtaatgagcactttaaaaagggagattatctacaggttaaggagtaaggaagttatcaattagataccatcgtcttcaaaatttcacttactcaaactttagattaatagaaaaacatttttggctgacttaagcgatgttttgaatctttacaaaccatttgtttagtgtgcacagcatgaaatctagaaatgaagacaccccattctttccagtactgccctcaatggttctatagccttggctaggtcagtaatttctttgtatcttagttgacttcttagattttcctctatagagatacagttccatctctctcacatcttcaaaatgcattcaggctctatgcctgtgtcagaagttgctctctcactcctttcattcagttactttgatcacttgaagaccctctaattcacgattcaaccaacatttattaagggctttctccatgacaggcaattcagtgaaggtggggatggggtcagtccctaaaaggatactaatactagtctactaacagaaaaaaaaaaaaaaatcctcttcggacttcctttgtttttttgttgttgttgttgttttttgtttttttgagacaggatctgtcatccaagctggagttcagtggtgcaagcatagctcactgcagcctcaaactcctgggctcaagcaatcttcccacctctgcctcccaagtagctgagagtgtaggcacgagccaccacatctgatttagatttcctattctttatttcctctagtatattcagctagaaattctaagaattaagttgtggtaggtttacaggattgggttaaggcagtcattcagtgatcgatggttacaggaccaggcagcctaggagttaatatggtttcaaaacagagataagtcacagaatggagcaaagtcaccaatttcacaagatgaagataactcttcatgcatggtaccaatgatgacccttggtttgctgaatcctttggctttattactccaccctttaaggcagaactctctagacctactctgcaagctatgttgacttctgattctcttaaacagggagccattcatctcagcccataagtcttcaatatcagtgtgttaaagccagagtcatgtcttccaactaagtctgaaaccttgtaaagagaggaaaggaagatgggaagagatctatgttgtccagaagtactaaggggccattttctaacggcagaacttaactttgagactcccaactctggatatttgctcattcttccccatctaccaatcccattggtacctgtgtgacaacctcctccgctttgtctctgacctgttgcttgccatgatccttgccattcagaggccatttggctctgatccatggccttgttgtaatcttgggtcacagatatgctaccaatctgaaatgcttatctggttcctgaccccaggcctaggcctgatcacaaactaaattattctcttgccacctgtcccatgccatgcatatcagtctcatcacagtttcttatcctgcttccccacccacggctgcctatagttctagtgctggctaaaattatagaatcttttttaattcattctggaaggacaaagtaattaagagatgattagtttatgtgacaacaatatgcagaaaggatataaatttgctcacaattaactgtagtatgtgcattgttattatatctttccacacctcaagctttcaatctctaaattaatacatttgccaccacattctctcaaagatatatttatgcatacttaattaacatgtactctgggagtgcaataaagctataatacattcctgcatttctaactacataatgagtatttaaaacatttagaaacaaattggctcccaataaggaataaaaatgttgagtaacttatttttcaaatataatgtctatgccacttaactgaatatttctgaaatgttatataaaaagaaaaatattataattgaatcaagaaaagcataccattctgaagaaattcagtggtgggttctttttcatagtaaagaaggattttggaaatggtgacaactatcccataattaataagttttgtatgttcagctataattacattgaattttctgaaagagagactaatgtgaacaatattccaggaaaggaatattctttttttttctaacttttttcggggggagaacagagtttcagctctgtcacccaggctggagtgcagtggtacaatcatggttcattgcagcctcgacctcccaggttcaagtgatcctcctgcctcagcctcccatgtagctaagactacaggtccacatcaggctaatttttaaaatttttttgtagagacaaggtctcaccatgttgtccaggctggtgtcaaactcctggggtcaagcaatcctcccacctcagcctcccaaagtgctgggattacaggcgtgagccaccacgcccagcctagaaatattcttctgagtacatcttattaggttaacttgctttaaggctttgccttttctactagtgaagcactaaaacatatcctttttaatttaaagacacaaagattttcattgctcttacatgaagagcattctaaagtgttagaataaagtatacttctaaaatgtaaaaaagttaaaggagattcctcacctcaattcttaggagatgctgtatctggaaagggtaaacagaagcaaacagtttcctgaaattgtgccaaggctacatgtcaactgcctggcaggaaatgctttggagaacctagataaacagactatcatctttctctggctttttataaagcaaatgtactgagttaaactagcatcatagacacaacaagcagaaaagggcaccgagaaattttagatgatagtacctgtaggatttatgacaattaaatcagtggtctgtccgtcacttttaacatacatgaacatcacggctcaacaaacatgtactcaatacatgtctgttggatttttgcagtaaattaaatcttaccgttccattaattttcatcatgattttggtgaagatttatctttttttttggcaggggtgtagacagagtttcactcttgttgcccaggctggagtgcaatggtgcaatcttggctcactgcaacctccacctaccgggttcaagcgattctcctgcctcagcctcccaagtagctgggactacaggcatgtgccaccacacccggctaattttgtatttttagtagagatggggtttctccatgttggtcaggctggttttgaactcccaacctcaggtgatccatctacctcggcctcccaaagtgctgggattacagcacggtgagccaccacgcccggcctgtgaagatttatcttacaataaattttcattttgcagcagctcttaatattttggcattatagaatgataaagctttcttacatttatatagcaaataatttttcaaaatattttgcattatcttcatttttttctaacttctcatttcacaagtgctagcaataatgcttaggcaggttaaacaatttggttgtagtcaaagattaagttagtcagagaaccaggtttagaatcaatttgcctgaaacatttgctagtattttccctctctccccactgtataacagaaaatggatttgaaaatccctctactatctttactaaaataatcctcctacctcaccttattttactttacttaactgcaaaaaggatgataatatatgtgttaactgataatatctactgtcaaccaaataaatctgtcttgcataaagtctactcagcccttccataccttttctctctccaccagccacatgttctattcagctccaatcctaaccacacatcttctctttcttctttctcatactagaaggatcctctgccccacataccttatgcccagtcttgcctggtcacaaaggggagcaaaacttccctaatcaaaggaataaagtaatataaaaggtgacatacctctctacctgctataatatcctttagccaaggcacctcagataacaatttgagccacctcaaccctgaggtccctccccatgatccacaaccaccatctgtgacttccagtatacacccaatctgcccctccctcccaaatggaacatcttagccttcgttactactggggatggggagaaaaaaataaactttgtgtggaggccagttatgttctctgcacaaaatgtggagaaggagacagcattctggtggagtaggaagctgctggaatgtctctccccagctagacaacatttgcacagcagcatctgtctgatgtaattattttggaactctagagtctattgaaggtttgtgacttccaggaaaaggcttggacctaaattgtggttaattttggtcaatttcggctcttagtgtagtggacgctacccatgaccacccccatggcaggcagctgtacacatttcctgaaacagcttgctggagccaggatgggcaaaaaggatcttgtccttcaaatgtcagtgatctgtgctctgtctgctgattgctgcttctgatcatagatgtgcagagaaagaggctggtggccattgttgcaagaatgaacttggacccttacctaacgcctatacaaaaattaactcaaaatgaatcaaagacttaaatgcaagacctaaaacaataaaattcttagaagaaaacataaggccaaagcttcaaaacgttgaattggcaatcatttctgggatatgacacaaaggcacaggcagcaaaagaaaaaattgatatattgcactgcattaaaattaaaaatttgggggcaccaaaggaaactgtcaacagagtaaaaatgcaacccacagaatgagagatatttccaaatcatatatctgataagggattaacatccagaatatgtagagaactcctaaaactcgacaacaaaaaacaacataattcgaaaatgggcagagaacttgaatagacatttctcaaaataagatacaaaaacagccaataacaatatgaaaagatgctcaacatcactaatcattacggaaatgcaaatcaaagctacaatgagatgccacctcatacctattaggatggctaccattaaggaaaacaaaggcaaaataaaagtaacaaatgttggtgaggatatggagaaactggaacacttgtacactcttggtgggaatataaagtggtatagtcattgtggaaaacagtatggtgattctgcaaaaagttataaatagaattaccatatgttccagcaattcaaccatgggtatatacccaaaaaattgaaaccagggtctcaaagagatatttataaacccatgttcatagcagcattatttgcaatagctaaaatgtggaagcaacaaaaatgtccatcaatggatgaatggataagcaaatgtggtatgtgcatacaacagaatattattcagccttaaaaaggatggacaggtggttccaagatggccgaataggaacagctccagtctacagctcccagcatgagggacacagaagacgggtgatttctgcatttccaactgaggtaccgggttcatctcaatggggcttgtcagacagtgggtgcagtacagtgggtgcagcccaatgaacatgagccaaagcagggcgaggcatcgcctcacccgggaaacgcaagggtcagggaattccctttcctagccaagggaagctgtgacagacagcacctggaaaatcaggtcactcccaccctaatactgcacttttccaatggtcttagcaaacggcacaacaggagattatatcccgcacatggctcggagggtcccatgtccatggagcctggctcattgctagcacagcagtctgagatcaaactgcaaggtggcagcgaggctcagggaggggcacctgccattgctgaggcttgagtaggtaaacaaagcggccaggaagctcaaactgggtggagtccaccgcagctcaaggaggcctgcctgcctctgtagactccacctctgggggcaaggcatagccaaacaaaaggcagcagaaacctctgcagacttaaatgtccctgtctggcagctttgaagagagtagtggttctccaagcacggaatttgagatctgacaatggacagactgcctcctcaagtggatccctgacccccgagtagcctaactgggaggcaccccccagtaggggcggactgacacctcacacggctgggtactcctctgagacaaaacttccaggggaacgatcaggcagcaacatttgctgttcagcaatattcactgttctgcagcctccactgctgatacccaggcaaacagggtctggagtggacctccagcaaactccaacagacctgcagctgagggtcctgactgttagaaggaaaactaacaaacagaaaggacatccacaccaaaaccccatatgtacgtcaccatcatcaaagaccaaaggtagataaaaccacaaagatggggaaaaaacagagcagaaaagctgaaaattctaaaaatcagagcacatctccccctccaaaggaacgaagctcctcgccagcaacagaacaagctggatggagaatgactttgacaagttgagagaagaaggcttcagatgatcaaacttctctgagctaaaggaggaagtttgaacccatcgagaagaagctaaaaaccttgaaaaaagattagacgaatggctaactagaataaccagtgtagagaagtccttaaatgacctgatggagctgaaaaccatggcatgagaactacgtgatgaatgcacaagcttcagtagccaattcagtcaactggaagaaagggtatcagtgattgaagatcaaattaatgaaatgaagtgagaagagaagtttagagaaaaaagagtaaaaagaaatgaacaaagccttcaagaaatataagactacatgaaaagaccaaatctacatctgagtggtgtacctgaaagtgacagggagaatggaaccaagttggaaaacactctgcaggatattatccaggagaacttccccaacctagcaaggcaggccaacattcaaattcaggaaatacagagaacaccacaaagatactcctcgagaagagcaactccaagacacataattgtcagattcaccaaagttgaaatgaaggaaaaaatgttaagggcagccagaaagaaaggtcaggttaccctcaaagtgaagcccatcagactaacagtggatctcttggtagaaactatacaagccagaaaagagtgggggccaatattcaacattcttaaagaaaagaattttcaacccagaatttcatatccagccaactaagcttcataagtgaaggagaaataaaattctttacagacaagcaaatgctaagacattttgtcaccaccaggcctgccctacaagagctcctgaaggaagcaataaacatggaaaggaacaaccggtaccagccactgcaaaaacatgccaaattgtaaagaccatcaatgctacgaggaaactgcatcaactaacaggcaaaataaccagctaacatcataatggcaggatcaaattcacacataacaatattaactttaaatgtaaatgggctaaatgtgccaattaaaagacacagactagtaaattggataaagagtcaagacccatcagtgtgctgtattcaggagacccatctcacatgcagagacacacataggctcaacataaagggatggaggaagatctaccaagcaaatggagaacaaaaaaaggcaggggttgcaatcctagtctctgataaaacatactttaaaccaacaaagatcaaaagagacaaagaaggccattacataatggtaaagggatcaattcaacaagaagagctaactatcctaaatatatatgcacccaatacagaagcacccagattcataaaacaagtccttagagacctacaaagaaatttagactcccacacaataataatgggagactttaacaccccactatcaacattagacagatcaacgggacagaaagttaacaaggatatccaggaattgaactcagctctgcaccaagcggacctaatagacatctacagaactctccaccccaaatcaacagaatatactttcttctcagcaccacaccgcacttattcgaaaattgaccacatagttggaagtaaagcactcctcagcaaatgtaaaagaacagaaattgtaacaaactgtctctcagacgacagagcaatcaaactacaactcaggattaagaaactcactcaaaactgttcaactacatggaaactgaacaacctgctcctgaaggactactgggtacataatgaaatgaaggcagaaataaagatgttctttgaaaccaatgagaacaaagacacaacataccagagtctctgggacacatttaaagcagtgtgcagagggaaacttatagcactaaatgcccacaagagaaagcaggaaagatctaaaattgatctaaaaccctaacatcacaattaaaagaactagaaaagcaagagcaaacacattcaaaagctagcagaaggcaagaaataactaagatcagagcagaactgaaggcgacagagacacaaaaaaaccttcaaaaaatcaatgaatccaggagctggttttttgaaaagatcaacaaaattgatagaccactagcaagactaataaagaagacaagagagaagaatcaaatagacacaataaaaaatgataaaggggatatcaccaccgatcccacagaaatacaaactaccatcagagaatactataaacacctctacgcaaataaactagaaaatctagaagaaatggataaatttctggacacatacaccctcccaagactaaactaggaagaagttgaatccctgaatagaccaataacaggctctgaaattgaggcaataattaatagcttaccaaccaaaaaaagtccaggaccaaatggattcacagtcgaattctaccagaggtacaaggaggagctggtaccattccttctgaaactattccaatcaatagaaaaagagggaatcctccctaacccattttatgaggccagcatcattctgataccaaagcctggcagagacacaacaaaaaaagagaattttagaccaatatccctagtgaacatcaatgcaaaaatcctcagtaaaatactggcaaaccgaatccagcagcacatcgaaaagcttatccaccatgatcaagtgggcttcatccctgggatgcaaggctggttcaacatacgcaaatcaataaacataatccagcatataaacagaaccaaagacaaaaaccacatgactatctcaatagatgcagaaaaggcctttgacaaaattcaacagcctttcatgctaaaaactctcaataaattaggtattgatgggacgtatctcaaaataataagagctacttatgacaaacccacagccaatatcatactgaatgggcaaaaactggaagcattccctttgaaaaccggcacaagacagggatgccctctctcaccactcctattcaacatagtgttgaaagttctggccagggcaatcaggcaggagaaagaaataaatggtattcaattaggaaaagaagaagtcaaattgtccctgtttgcagatgacatgattgtatgtttagaaaaccccatcgtctcagcccaaaatctccttaagctgataagcaacttcagcaaagtctcaggatacaaaatcaatgtgcaaaaatcacagcattcttatacaccaataacagacaaacagagagccaaatcatgagtgaactcccattcacaactgcttcaaagagaataaaatacctagtaatccaacttacaagggatgtgaaggacctcttcaaggagaactacaaaccgttgctcaacgaaacaaaagaggacacaaacaaatggaagaacattccatgctcatggataggaagaatcaatattgtgaaaatggccatactacccaaggtaatttatagattcaatgccatccccatgaagctaccaacgactttcttcacagaattggaaaaaactactgtaaagttcatatggaaccaaaaaagagcccacattgccaagtcaatcctaagccaaaagaacaaagctggaggcatcatgctacctgacttcaaactatactacaaggctacagtaaccaaaacagcatggtactggtaccaaaacagagatctagaccaatggaacagaacagagccctcagaaataataccagacatctacaaccatctgatctttgacgaacctgacaaaaacaagaaatggggaaaggattccctatttaataaatggtgctgggaaaacttgctagccatatgtagaaagctgaaactggatcccttccttacaccttatacaaaaattaattcaagatggattaaagacttaaatgttcgacctaaaaccataaaaaccctagaagaaaacttaggcaataccattcaggacataggcataggcaaggacttcatatctaaaacaccaaaagcaatggcaacaaaagcgaaaattgacaaatgggatctaattaaactaaagagcttctgcacagcaaaagaaactaccatcagagtgaacaggcaacctacaaaatgggagaaaatttttgcaacctactcatctgacaaagggctaatatccagaatctacaatgaactccaacaaatttacaagaaaaaaacaaacaaccccatcaaaaagtgggcaaaggatatgaacagacacttctcaaaagaagacatttatgcagccaacagacacatcaaaaaatgctcaccatcactggccatcagagaaatgcaaatcaaaaccacaatgagataccatctcacaccaattagaatggcggtcattaaaaagtcaggaaacaacaggtgctggagaggatgtggagaaataggaacacttttacactgttggtgggactgtaaactagttcaaacattgtggaagagagtgtggcaattcctcaaggatccagaactagaaataccatttgacccagtgatcccatttctgggtatatacccaaaggattataaatcatgctgctataaagacacatgcacacgtatgtttattgcggcactattcacaatagcaaagacttggaaccaacccaaatgtccatcaatgatagactggattaagaaaatgtggcacatatataccatggaatactatgcagccataaaaaaggatgagttcatgtcctttgtagggacacggatgaagctggaaaccatcattctcagcaaactatcacaaagacaaaaaaccaaacaccgcatgttctcactcataggtgggaagtgaacaatgagaacacttggacacaggaaggggaacatcacacaccagggcctgttgtggggtaggggggtgggagggatagcattaggagatatacctaatgtaaatgacgagttaatgggtgcagcacaccaacatggcacatgtatacatatgtaacaaacctgcacgttgtgcacatgtaccctagaacttaaagtataaaaaaaattttaaaaaaaatggatggacattccgcaatatactacaacatggatgaaactttacgacattatactaaatgaaataagccagtcacgagaagaaaaatactgtatgagtccacttatatgaggtacttacagtagtcaaaataatagagacagaagacagattggtggcttccaggggctgggagtagggaagaatagacaattattgtttaacgaatacagagtttcagttttacaagatgaaaagaagtatagagatggatggtggtgatagttgcacattttgaatatatttaataccactgaagtatacacttaaaaatgcttagaaaactatattttattttgtgtgtttttttattttttatttttattttttgttaaagaaaggtttattcttttagagatgggggttccgctatgttgaccaggctggtcttgaacttctggcctcaagagatcctcccatctctggctcccaaggtgctcgaattacaggtatgaaccaccatgaccggcctattttatgtgtattttaccacaattttagaaattggaaaaaaaatgtggagggtatggtatatgactggaaaaagaagtcacaaaactgagggatataaatacttgaatgcaaacagtaatataatcacagtataacttacatttattaaatagagtatacccataattataattaggtaaacttagtataagctaggagatataaaattttctctagaactggtataatactaaccctggagatctggctacctactctacttgctagagcttcctggagtggaaatacattccagtatcaatgcacagaagaggtttaataaatgtccatggaacaaataaataaatattgatggaaggaataaatataagctttatcctaaaagaatatataaaagtaagccttaagagagtccagaattatatcacaaaaaaggttaggaggaatataaaattggaagggaacaggaattggaatatattaatttttgaaaactgctggatctgtcgggaaatactgtgaccttttttaggtcactaaaactctacacaaggaacacttccagaatggcatagtgaggaggctggcaaatcgtttaacataaagccgcaataaaactgtacaggtagtctctgacttataaagatttgacttcggttttttcaactttatgatggtgcaaaagcaatatacattcagtggaaaccatatgttgaatacccacacaaccattctgtttttcactttcagtacagcattcaataaattacatgagatattcaacactttattataaaataggctttgtgttagatgattttgcccaactttaggctaatgtgagtgttctgaacatgtttaaggtaggctatgctaagatacgatgttttcagataggtgtattaaatgcatttttgacttacaatattttcaacttaaaatgagtttatcaggatataactccttcctaggtcaaagaacatctgtacaaaactgttaaaacaatcatttcaggattttgaaaactgagactgggctcggtggctcatgccttgtaatcccagcactttgggaggccaaggcgggtggatcacctgaggtcagcagttcaagaccagcctggccaacatggcgaagcccatctctacaaaaaatacaaaaaaaatttttttttttaaaaactagccaggtgtggtggtgcatgcctgtaatcccagctactctggaggctgaggcaggagaatcacttgaacccgggaggcagaggttacagtaagcagagattgcgccactgcactccagcctgggcaacagagcacgacaccatctcaaacaaacaaactaactaactaaccagaggcacatgacaaattaaaaagcatttataaaggaaaaaaatcaaactattgaaccttggtaagaaaaatatgaatctatggtattttgagtttttgcaatccctacactccctacccccagctccaacatagtagttctatcaggacagtaaaatccatgaaaatcagcagctctgcaatgtaatttggtgcataggacattgtcagaaacatgtgatcttggtagtaaatgatcagggaaagtcaatatcattgctggctgaaactgtagttttggttgggaaaagtaacagaccagccagaaatttaataggcagatctagggaaaaagacagccatagtggaacctgatacccttggtggtctggaaggctgtgtacaagggcacggttatgcacatgcccaggagagaccacagtgggctacagatttcaatggctgaatgtgaagccttgcatacatagaaataaaattggggcagacttgactgaactctatttctttgttcttgtttttttagaggtagggtctcacatggttgctcaggctggagcacagtggcacaattacagctcactataaccttgaactcctaggctccagcaatcctcccacagttaggaccacaggcatgcaccaccatgcccagctaattttttaaaaatttcttgcgaagacagggccttgctgtgttacctgggctggcctcaagctgttggtatcatgcagtcttcctgtcatggcctcctaaagcactgggattataggcataagccatagccacatggccttgactgaactttaaaggtgttccccaaactatacacagattaattagcaaacagtagagccttactaggctcaagatgtttaagtacaatctcttcccagttattagctgaccactagctatgttgacccaggggcaattcctaggaaagagatttaaaaataaaaccaaattgggcacagcagcacacatctgtagtcccagctactcaagaggctgaggagggacaactgcttcagcgcagaaattcaagtccagcctgcacaacatagtgagaccccatctcataaaaaataaaataaaatgaagtaaaataaaataaaaacaagaattagaaaggaaaaaattaagaaaagatgtcagtagctacacactacaggaaagaaagactacagaatcaaccccgttaactcactaaacaaataaaccaacaaacagcagcaatatcaaaaatccttaggtagggatggaaatcagaatctggagttgccatcatacattatttaaaacagcgatcagcaaactacaactcatggcccaattatggcctactgcttgttttttaaataaaggtttattggaagacatctactttcattcatttacatattgtctatggctactttcacattacaatagagaccacattgactacaaagcctaaaatattttctatccagtcatttatagaaataaattgttgacctctgatctaaaatgttcagttttcaacaaaaaattgcaagacatacaaacaaaaagtggggcccatatatagaaaaaggtgcagttaatggaaactttttctgtaggggcccaaatgttagacttagcagacagacttcaaggcagctgttgtaaatatgttcaaagaactaaagaaaacaaaattttaaaaattaaagtatggcaacagtgacaatatagaatatcaataaaaataaattataaaacaaaacaaattatggagtgaaaagaaaataattgaaatgaaaattcactagaggggctcaagagcaaatttcagattacagaaaaagaatcagtaaactggaagatagatagatcaatagagattatacaatttgaagaaaagaaaagaaaaagaatgaagaaaaatgaacaagcctcagagatttgagagataccaccaaacatactaacatatgtataaggagagtcccagaaaaagaagagaaagagaaagggacagaaaaaaatggctgaaaactttataaatttgaggaaaaacaaatctacacatccaagaagatcaaaagaactccaagtaccataaacacaaagaggtccatacctagaaacaccaaggttaaactgttgaaaggcaaacacaaagagaaaatcttgtaagcagcagagaaaagtggatcatcatttacaaagaaaccacaatcaaattaacagatgactttttatcagaaacaacagagactaagaaagcagggatcaaagtgtttaaaggaaaaaaaaaatctgccaactaaaaattttatatccagcaaaaatagccttatagcctttaaatgtgaaggtgaaataaagacagttgataaacaaagactgaaaaaatttgttgttgccagcttgccttacaagaaatactgaaggaagtttttcaggctgatggaaagtgattttagagttactcaaatctacagagaggaatgtagaacatcagaaatagtaaatatattggttaatataaaggactctatacatatgtttctcactttttctcataacttctttaaaagccataagagcatataaagcaataattgtaacactgtcttgttggatctgtaacatatatgaatgtaatataacagcatgagaaggggggatatggagttatattggacagaagtgtctatatttcacctaaattaagtttatatcaatcagtagattgtggccaggcatggtggctcacacctgtaatctcagcactttaggaggccgagatgggtggactgtttgagcccaggagttagaggccagcctgggcaacatgatgagacaccatctctataaaaaatgtaaaaattggcccagcacagtggctcacgcctataatcccaacactttgggaggccgaggcgggtagatcacaaggtcaggagttcgagactgtcctggctaacacggtgaaaccccgtctctactaaaaatacaaaaaaaaaaaaaattagctgggtgtggtggtggtgcctgtagtcccagctactcaggaggctgaggcaggagaatgacatgaacccgggaggtggagcttgcagtgcccaaggtcgtgccactgcactccagcctgggcgacagagtgagactccatctcaaaaaaaaaaaaaaaaaaattagccaggtgtgttggcgtgtgcctgtggtcccagctactcaggaggttgagttggggggatcacttgagcctaggaggtggaggcaacagtgagccacacttgcgccattgcagtccagcctgggtggcagagcaagaccctgtctcaaaaaaaaaaaaagaaagaagtagatcgtgacaaataaagatgcatattctaattcctagaacaatcactaaaaaatttttttaaaggccgggtgcggtggctcatgcctgtaatcccagcactttgggaggccgaggtgggtagatcacctgaggtcaggagttcaagaccagcatggccaatatggtgaaaccctctctctactaaaaatacaaaaaaattagccaggcatagtggtgggcacctgtaaccccagctacttgagcagctgaggcaggagaatcacttgaatctgggaggcagaggttgcagtgagccgagatcatgccattgcactccagcctaggcaacaagagtgaaaccttggtcttgaactcctgaccttaactgatctgcccaccttggcctcccaaagtgctggaattacaggcgtgagccaccacacctggcccaaattttaatatcttttcaaagaaccaactgttggtttcattgatttttctctatttttctactttgtattttattgatttctacctaatcatcattatacccttcctcctgcttcctttgggtttagtttgttcttcttttcctagtttttctttttctttcttttcttttcttttcttttttttttttttttttgagatggagtcttgctctattgcccaggctggagtgcagtggtgcaatctcagctcactgcaacctccacctcccaggttcaagtgattctcctgcctcagcctcccgagtagctgggattacaggtgcatgccaccacatctggctaatttttgtatttttagtagagacggggtttcaccatgttggccaggctggtctcgaactcctgacctcaactgatctgcccacctcagcctcccaaagtgctgggattacaagcatgagccagcatgcccggctcctagtttcttaaggtagaaacttaggttattgatttgacctatattcttttctaatatagacatctaaagcttggcacttccctctaatcacagttttagctgcctctcatacattttgatatatcacatctttgtttcctttcagttcaaaacatttcctagtttcccttgtgatttagtctatgacccatggattatttacctatgcgttgtttaatttgcaaatatttgtagattccccaaattgtctattgttgatttctaatttaattctattgtgggtagagaacatacctggtatgatttcagtccttttaaattcattgagacttgttttatgacctaataatggtctgttttggagaatgttctgggagtatttgacaagaatgtgtattgtgctattgttggatggagtttcctataggtgtcaaggtggctgacagtatcgtttagccttctatatctttgctgattttctgtttgttctatcagttattaagactgaggattgggctgggcacggtggctcatgcctgtaatcccagcattttgggaggctgaggtgggcgaatcatgaggtcaggagttcaagaccagcctgaccaacacggtgaaaccctgtctctattaaaaatacaaaaagtagccgggtgtggtggcacgcgcctgtaatcccagctactcaggaggctgaggtaggagaatcacttgaacccaggaggcagaggctgcagtgagctgagatcacaccactgcactccagtgtaggtgacagagtgagactccatctcaaaaaaaaaaaaaaaagagtgaggtgttgaagtccccaactaccactgttgaattgtctatttcttgcttgaattttgtcagtttttgctttggtattttgaggctgtgttgttagggtcatgtacatttgcaagtgctatatcttccagatgtaatgatttgtcatttttgtgattctgatatgccccactttgtctagtgatatttcttgtcttcaagtctattttgtctgatgttaatacatttacttcagcaatctttttttggcaaggggagtcgcttaaagcaacacaagtttattatcttaaggttctggaagtcagatgtctgaaatggttttcactggactacaatcaaggtatctgcaggattctgtttctttactccagcaatattatgcttatagtttacatggtatatctttttctttaactttcaacttatttgtgtgtttgactataagttgtgtttcttgtagacagacagttggatctaagccagtctgacaatctctgcttatagaatgggctgttgagaccattcacatttaacattattatcgagatggctgaatttacatttgatcacagtggtgcaatctcggctcactgcaacctccacctcccaggttcaagcaattctcctgcctcagcctcctgagtagctgagactacaggcatgcgccaccacacccagctaatttttgtatttttagtagagatggggcttcaccatgttggacaggatggtctcgatctcttgacctcatgatccacccaccttggcttcccaaagtgctgggattacaggcatgagccaccacacctggccatctgtattttttaaagttttatttatttatttattttttgagacagagtttcactccagcataggccaacatggtgaaaccctgtctctactaaatatacaaaaattagtcgggtgtggtggcatgcacctgtaatccctgttacttgggtggattaggcagaagaatcaatcacttgaacctgggaggcggagattgtagtgagctgagattgcactactgcattccagcctgggtgacagagtgagactgtctcaaaagaaaaaaaaaggatattacaagttgacaaaactttaactagactgaccaagatgttaaaaaaaaaaaaaaaaaagcaagagagagaaggcacagattaccataatcagatcttaaagaaataaaaaagattgtgagggaatattaccaatagctttttgtcaacaaattagacaacttaagtgactgggcaaattcttagacaccaagtattgaaactgactcaagatggaatagaagatcacttgagttcaggagttcaagaccagcctgggcaacatggcaaaaccacatctctactacaaaaagtaccaaaaaaattaggtgggcctagtggtgatgcatgcctgtagtcccagctactcgagtggctaaggtgggagaatcacctgagcccagggagttgaggctgtagtgagctgtgattatgccacggcactccagccttggcaacaggagtgagaccttgtctcaaaaaaaaaaaaaaaaaaaaaagaaggaatagaaaatataagtagacctaaaacaaggaaaaaagttgaattagtaattaaaaatcttcccacaaagtaaagcccaggcccagatggttttaatcaaatgcttaagaataataccaattctacacactcttccaagaaatagaacattcctaaatcattctataaggccaatattatcctaataccaaaagacacaaagaccagaaacaagaaaactagagatcaatatccctcatgaatatacacagaaaaatcctcagtaaaatactagcaaaccaaattcaacaacgaaagattggcttaatatccaaaaatcaattcattcaacacatgttaatagaataaaaaataaaaaccacatgatcacatcaatggacatacaaaaaacgtctgaaaaacttcaaaaatcattcatgataaaaactttcactaaaccaggaatagaaggaaacttcttctcaacctgaagaagctaattaaaaataatttttaaagatagatgagaacttccttaacctaataaagagtatctacaaaaaaacaaatatcatacttaatggtaaaaggctgaatgttctgcctctaaaattgggaacaaggcaaagatgttccccttgccacttctattcaacattgtactacaggttcaagccagtgcgattaggcaagaaaaagaagtcctgattgaaaagaaaaaagttagcctttctttattcacagaagatctgatccagtatacagaaaatcctaaagaatccacaaaaaaattcttagaacaagtaaatgagtttaacaaggttacaggatacaatatcaatatgaaaaagtcaactatatttctatacactagtaataatttcatctgaaaatgaaattgagaaaacaatttcattcacaacagcataaaaatacttaataaatttgttaaaagaagtgcaatatgtacactaatcactacacaatattagtaaaaaaaataaagaaaactgaaataaatggacagacattccatgttcataaattcaaaaacccaatattgttaagattgcaattcttcctcaattaatctgtgaattcaatataatctctatcaaaacatcaacagttgttacacagaagttgacaaactgaatttaaattttatggaaataatgactgtactagaatataaaaataattttgaaaatgaagaacatagttgatatacttcccaatttccaaacttactacaaaactacaataatcaatacagtataatatggcataaggacagacatatagatcaatagaacataatttaaagtctaaaagctaactcttacatttatggtgaattgatttttgacaaagttgccaagggaatttaatgagaaaaggatagtcttttatacaaatgatactgagaaaattgaacatctgcatgaaaagaaatgaatctagacccttacctcataatgcacataaaaattaatgcaaaatggcatagagttaaatgtaaaaactaaaatatacaactattaggaggaaacatagaaaaaatcttcaaaaaaaattttcatgaccttaggttaggcaaagatttcttagatataacaccaaaagcacaatttataaaggaaaaaaattaataagttggagttcatcaaaactttaaatgttagtacttcaaattacaccactaagaaaatgaaatacatgacacagcctgggagaaaatacttatgaatcatacatctggtgtgggtgcggcggctcaagtctgtattcccaagagaaatgaaaacatgtgtccacacaaagtcttactatgcattatcagtcaaaatagccccaaaccagaaacatttcagatgaccatcaaccagtaaatggataaacaaaatgtaatatattcatataacgggatagtattcagtcataaaaaagaatgaagtattgatacatgctacgacatgtgtgagcctcaaaaacattatgctaattaaaagaagccaggcaaaaaaaggtcacatattatcagattccatctatatgaattgtccagaaaaggcgaattcataagacagcaagcagaagactggtcacctaggaccagaggcaggagctgagaactgactgcatatggtatacactagggatttttctcaggtaatgacagtgttccaaaactgcactttggtgatgttgacaactctgtaaatttacaaaaaatactgaaatatacacttaagacaggtaaattttatcatatgtacattatacctcaataaagaagtcttttttttcttttttttttttttttttgagatggagtctcgctctgtcacccaggctggggtgcagtggcgcgaccttggctcactgcaagctctgcctctcaggttcacgccgttctcctgcctcagcctcccctgggactacaggctcctgccaccacgcccagctaattttttgtatttttaatagagatggggtttcaccgtgttagccaggatggtctcaatctcctggcctcgtgatctgcccatctcagcctcccaaagtgctgggattacaggtgtgagccaccgcgcccagccaagaagtcttcaaaaaaaaaaaaaaaaaaactctacataaatttcaactgtttatattaaatatcttccaaatactattcctttgatctctgacttttaaaaatgacaagatttcaatcattcctgctctgcaaccaatttttttaactcccagtcaattttaaacagattgtgaaagttaattctcagaagtttgattcattttctttaatctacatcatcaagatgacaattttgataatgagtttctttcattcccccaataacccagtgagatgatgtaatcaggcaaaatgaatgatctaatgactcagtctgtaatactaccttacaaagctgtgatgattccaaagctcttaagtctgctggagaaataacaataccatttgtcaaataaaatgatttatacagtttctggtatgtacagtataaatcactgtctaactctggcacagtacccacttttgcatcctgggtttttaaccctttttggcccccttcacataaagaaaaggaatttacattgctcttcactggacttgttttttctcctcaaaaagtcccaaatacagcaccagtctctttccccatttcacaattaaagacctcttccaacgcatctcctccaaaacatagaaccctgacaactaactttcatctgttctcattagtgaatttacccttgtgaagatagaagtcattaaaaactcatatcaatagtttatttttctgtcaatactgacagtctatttccctgttgaccaggcacattcctaattagttgccctctctccatttacaattccattttcagttctcaccagtggctttcatttggcgtgggctatatttgatccacaaggggcctgatggtaggtcatgttctatcattattcccagccaatcttaaaaaagataaaaaggaatctctcaagtctctcaatctgtggtttacaggatgaatctttaaaattataaatatgcacatataaaaatatatttacaaatatatttacaaatagaaaaataaaaacaaatgcaaagatttaatttagagtcttttggtttcagtttcatttcaagcatcttctttcccataaatttctaaatgttaaattctgagaaaatgtagttacaattgaatattcattacattcattaaagttcatgtaggtaggtgtttttttaatagaaaagccaactcttttttttcttaagataggttcttactctgttgccccggctggagggcagtggcacgatcatagctcactgcagcctcaacatcctggactcaagcaatcctcccatctcaacctcccgagtagctaggactacaggtatgagccaccatgccaggctagttttttaattttttaaaaaatagagacaggggtctcactatgttgcccaggctgctgtcaaactcctggcctcaagtaatccttccacctcaacctcctgaacttctgggattacaggtgtgagccaccacaaagccacctctttatgtgggctaacagaagtctatttaacttaaaaattaaatcagagtaatttcaacaaatggctactgaacacccgctacttaacaggtcctggaatgtttagggacaaataaggaacagtttctgccttcaaggaattgaaaggctattgggagagaagaaaccataactacacataatttaaattagattggaaaagtacacacaaaaaatttttttaaggctatggcaacagaggtggcaactgggaaccactgggaaaagtttcaaagagctgacctgacaaaaagaaagtagtgcctcaactggaatgactaaaatagaatggggaagagagacaaatgagatgaggtgtggctatgatactgggtaagtgagagcatattttgggagaccaggctgaagcttaagataataatactagctaatatttattgagcacctactatgtaccaagtactataaatgcactttatagatattaacttacttgatattcacaataaccctatgaggaatgtgctaaaaccttgaaatccataaaaaataaagaggaccaaattctgtcccactccaaccacacttattgtaaaagcagttaacgggtatcttatctacctcttctctcactgattcctaggccatcaggcctagcttgaaaactacattctctgcaaaacctttcttgatcctcccagctgaacatagtctcctaagcttgatagcattttatctgtgtcaatcttatggcatgtccgaatattttgttcttggtattatagattttatgtgcattctttcctcttttttattctcctttagtctgatccacattctgttctccacaactcctagggcagtgcctggcacatactaatgctagctaagtctatggagcacttatctttgccgggcactgtgctaagcattttacaggaattatctcacagaatcctaatggcaacccaattcacacattcaagggctatttttagtccttactgtgacagacaaaatagtaaatactagatgcaccttaaactctaaacactacagatacagtcccttccctcaagaagctcagtctaaagaagttagtactattggaatccccagatatagagatgaggaaaagtgaggctcaaagaagtaatatgtttgcccagaaccacagagcaaaaaagtggcagagagcctgggcaacatagggagaccctgtctctacgaaacatttaaaaaatttgcagggcgtggtggctgaagaagaggatcgcttgagcccaggaggtcgaggctgcagtgagccgagatcgtgccactgcacttcagcctggctgacagggtgataccctcgtttctttattaaacaaaaaagaagaagaaggaagaaggaagaagaggaagaagaggaagaggaaggaggaggaggaggaagaaggagaaggagaaggagaaggagaagaaatggaaaaaaaaagatggcagagccagaattcaaaccagctctcccgagtggatatacaggaccccatgcacgtacaaccactatgttctaaaggaggcacttgataaacccttattgaaggaaatgttttggaataccaataaaatgaaaaaaaaatcatctcaagaataatgtagggtttcactcactgttattcttttttataaggggaaagcaggaaatttgcaaaagttaagtagcatagaaggaggtcgtattggtcggctactactcacctggtacctgataattgctcatcaagccatctgttgagactaggtgaggatggagtttctctcctttttcatgaaccacagaggagacttaaaggaggatttatttgtgttccttaaagtgacccccactgagcgtgtccctcaaagtggaccttcctaagcatcggcgctttgctttgcgctgggtggtgcggctgagtcactaattagcagtgagagcctgggctgtatctcctaccaaataaccagcggagtggagtgacaggtccttacttaaacatggtttaagtaagcattcacagttccttacttaaacatggtgcagtcttcctaaaagatggagtcagaccccaagagaacaggtctccaaaaatatgtgaatccgtacttcccactggaggggagagagagctgcgctgagggattatgagagaccctacaacttctcaggcgccccctgccccgggggccaggaacatctgcagacagccccgcctccgtctcgcctcaatcccgagctgttcccttctccaaaggccaccttggcagccacacagtttggcctaatcacctcctcaaacaagagtagcgacaccccaaaatgtagaccaagcagaaagaggcgcgggaggcacttgccttattccccatgatgtttttgttttgagacgaagtcttcctctgtcgcccaggctggagtgcagtggcgcgatctcgtctcactgcaacctccgcttcccgggttcaagcgatcctcccacctcgaccctcccgagtacctgggactacagatgcgcgccaccactcctcctactgtgtgtgtgtgtggacacgggttgtcgctatgttgcctacctagctggtaccccataaccactcctggctagtgtgtgtgtgtgtgtgtggacacgggttgtcgctatgttgcctacctagctggtaccccataaccactcctggctagtgtgtgtgtgtgtgtgtgtgtgtgtgtctacacgggttctcgctatgttgcctacctagctggtaccccataattttttagctcaacaggagacctgcctttatacccaccaagttaagcagcgcagtagccctctaagggccagccccacgcccagaggctcctctgacagcgtggacagatgccctgggctgctggctcgactcagtcctcagcccccagcccccgacccccgacccccggcccccgacccccgacccccggcccccagcgcccggcgccccgcctccagcgctcagcagttaaccaggcaactcgcgcgcagacgccaaggctgggacgcagaaggcgtgtttggccgcccagccgccccgcctcccccacttctcccgcctctcccgcctctcccgccttccgccaatggcccagctgcgccggcgccgccgggagcgctaggcctggtccctcttcctagaatagcgttgcgcgcatgcgccttgacgagtgagccgggtgagggggctccctaagtagcggaaggggtagatgaaaatggaaggggcgggcgcgctaggcctagtcctggctgggctcccgctggagtgtgcgttgggggcggaccaggagcggtggtctccagggaggtcgaggctggggctcccacccggatttggagcagggtcgccgcggcccagctgacccgccggcgtttgtacgttgtgtgcccactcagggagccatggacaactgtttggcggccgcagcgctgaatggggtggaccgacgttccctgcagcgttcagcaaggctggctctagaagtgctggagagggccaagaggagggcggtggactggcatgccctggagcgtcccaaaggctgcatgggggtccttgcccgggaggcgccccacctagagaaacagccggcagccggcccgcagcgcgttctcccgggagaggtgagggtcgctgtgccgggggccgccccagtccttcgcgccgcggtagcccgctgggagccaggggtgcgcagcgcagaagcagctgaggaaaccttcccttagcggaagctggaaaggatcagaacaatgaatggaaaagtcctttcaaaacgctttacatttgacagattcttgttgggtagctgtagaataacggtagtgttcagccctggttggttacttaaaaaaaaaaaaaaaaattagccgggcgcggtggctcatgcctgcaatcccagcactttgggaggccgaggcgggcggatcacctgaggtcgggagttcgaaagcagcctgaccaacatggagaaatcccgtctctactaaaaatacaaaattagccgggcgtggtggcgcatgtctgtaatcccaggtactagggaggctgaggcaggagaatcgcttgaacccgggaggcggaggtcgcggtgagccgagatcgcgccattgcactccagcctgggcaacaagagcgaaacctccgtctcaaaaaaaaaaaaaaaaaaaaaatcttacagctatcatctgatagtagaggaaagcctgcaagcctgtctcttagatcctggataaattgcatgtctatcttttagagttggaattctttctcaataacatcgttctttctgacataaacttgcagagcctttccaaaagtaaaaaggagactatttccaaaatggcttcattctccagtagggaatcctagagctaacctgtgacgtgccatttattcaaata

SEQ ID NO: 148 - DNA, 70186 bp, Homo sapiens
  source 1..70186: mol_type = genomic DNA
gaggctgaggcaggagaatcgcttgaacctgggaggcagaggttgcagtgagctgagatcatgccactgcactccagcctgggctacaagagcaaaactctgtctcaaaaacaaacagaaaaacaacaacaaaaaaccgaggccaccgtcgagagagacaggcaattgttcatgaaatcggtctttcttttgaagtcagagactataacaactgtggcctcagctcaccgatgagagccaccgatggtaggcagcctccaggcctgggggagaaccagcagatcctcaccatctttaggttaataagtgaaataaaacctgtgagtcaggctgcagtcacggcctcacccggctcagggaaggagggagaaattcctcagggctcccttttctgatgttgccttgctttgtacttactgttccttttcctgttcagctgatgacagatgtttgacattaagcattttagagttttgttttttagaaaatagaatcatagattatcagaagtggaagtccctttggaataatttcccctgggttacacagatggctatggcagggtcaagggaggggacggtcagcggggactgagcgcaggccccctccaggctctgcagcaatgaccaggcagcaagccggcctcccgggcttgtgggctgtcctctttctctggggtcagcctgaggctggaagaggcccgtggcccaccgggcatcaggccaagcctggagctgaccagggaagggccctgccaggccttgggcctctgaccctcagtcctgaagcctccctctagcggcgcccaccctgctccttttcctgctgaattttactcaagtccgtacttgagtatggccggccctaggttaaccccgcagagttattaaccaggagtggctctttccacccccccttcccgccggcccttcctgctgtccacacccggccaactccactgtcctggcaagggagggcttcctggaggcggcagcgggcggcgcgtccggcctttgtccccccacgctctccagggtaggtccagggactgccagatcaggggaccctttgcgtcctggagccttgggggctggatgacgtcgccgggcacctgaggaccccgcccattcctccctcggttccccagggagcgggcggccggcggggctgggcggggccgaaggaaggggccgcttgctccgacgccgcgcacgcgccagggcccgcaggcgggttaggaaatgacgaccgcgcgcgggtctccagcagcacccgccctaggaccggccccgcccccaagtcccggtccctagggccgggcacgccactccaggccccgcccagaacctccccgcccagtcaagccccgcccccaaactctgtctccccgcggtatcctctggggctctccaggccccgcctcggctcgggccccgcccctccaggccccgcctccagccccgccccgcagacggcgctcgcagcgcccccggcccccaggcggcgcggctggtccccaggggtctgcgggcgactgcgcggctgaggcgcccgagtgcggtactggcggcgggcggcgggcagccatggcggaggccgcgtcgccgcacttgtcgctgccctcggggctgctggagctctgcgcgctgctgggcgccccccgggacagtctccgaagtctcgagcaggtgaggggcggggaaactgaggcggacgtgggccacgagtcggcagccgggacagcagtcggagagcgggcgcccgggtgccctgtgggttggcgcggactttccgagggctgagtcccggtcccccggcggtgaccccgcgcgcctgtggccggggatcgcgcccgagctcaggcaggtgccctggagcagcgccctgctcccctcccctcttctctcctctccccgcccggggcccttggtgtgagacatgtcttttgagagctgcgaacttggtccgccggccgggaatctgggggtgccgcccctcggagagtctctggggcctctctcttcagtcgctcccatcttgggcaggtgcttctgaaggtggggtgcaccagacaacgggcggaagccgccggagcctcacggtctagcgggcccagccctcgctgctgaaatgatttcattctttatgctgggatgtgttgtcccctgagtagtgggttttgcaccaggcacagaataacgagagagcaatcttagagttagccgccggcctcgcgtattctgcatgaacccctttgcgatgaagcctatagctatttttctcccttgcggtaccacccccacccccaacccttcctccatctctgcaccctcgcagccaaagtgacaacttcatctcccttctgctgggaaagcggcagttttggaaattctcgttttcctttttcttccccagcttttcttaattctgtaacgctggctttccctggaatccatctgtgtctctggtttcctcctggtccgcctgtctgtgacaccgtgactgggtcatgttacctagagatcccggcgtcactggccagccgtctgcacaggtccgttcatctctttgcagacaacagcatagaaaggcagagaggcttctgagtatttaaatgacgctgggctatccagggaaaatgaagactgcagggcagagggtgtcaccaggaaaggcagatgttcctgcaagtaaccagatgaatgtctgtgagtgtccggggagtttcccctgctgggcgtcagtaccaagccagtttcgacttcagtgaaaaagcattctcctatggaaatagtttcctcgtttccctcaacttttccttcccttcaacgccctgtcatgtcagtagatcccgtttgacctctgtctcctcgcaacgtcatcgattgatttgtctccctacctcgaatttgccagatggcatctcctcctttttcttcgaataggaagtgacctagttgccgctgtggtctcctcagccgttgaacgtctttcctctggggcagttacaacatgggtgttagttgcttggtgtgacacatgtcttttgagggcagggcgaatcaactggaatatttgcagtggtgctttctttttttcaatttctttattattattattatgttaataatagagaggaggtctcactgtgttgcccagactcatctccaattcctgagctcaagtgatcctcccgcctcagcctttcaaagtgctgggattacaggcgtgagccactgcgcctggccagtggtgcattcctgaactaaacacgctgcaacattttcatgttcccaggtcaagtgagagtatggacagtctgctactgtgcatgcttaactttgtcctctttactctgtcttttgattctgttaggggtttggcaaagggtggagagaaaagtagtgaaggactaagaaaataaggagcgttaggggatggattccatttcttggagccatcctacttttaaggtcaatattaatgttatagttaaccaaacatatgattttatttatttagatgttttttcggcggttctattttgaatgtccaaggcttttaaatatatttttttttttttgagacagagttttgctctgttgcccaggatggagtgccatggtgcaatctcggctcactgcaatctccgcctcctgagttcaagcaattctcctgcctcagcctcctaagtagctgggattacaggcgtgtgccaccatgcccagctaatttttgtatttttagtagagacagggtttcaccacgttggtcaggctggtctcaaactcctgacctcacgatctgcccgcctcggcctcccaaagtgttgggattataggtgtgagccaccgcacctggccgcttttaaataatttttaccttgacttttacaaatccccatttctctgtggcccaggcattccttcttgatgacacaggaaaacagaggtccggaggtatgaggaatatccagcttcatgttggatagtggagggcccttttgtttcatttcctagaagggggagtagtgtttgtttttttaggaatggtgaccgagactttgagaatgcaggctaatgttagttactgtggttagttacattcccctccacccctttactatagagccctccccaaccccattattggttgctatggagactagacataggtgtgacaggatccattataaatccatcacacaggagtagaaagtgttctgagtaccttgcgtagtacaggtcacccgcataattcttgcgtgtgaagctccatttttatggcttttggtggacatcgtcctgactttcagtttcagaacagcactggccagctggccttcctgggtgatggcagttcgtgtcctctctttgcaccgtgcagtacaatagccactggccacatgtggtcactgagcttgtagtgtggccagtgagctaagaaactgggtttaaaatttcatttaattctaactaaacagttggagagcaataaaaaaattgattaatttctgttttattcccttaataatggccaatcctatagtgaagatgaattccactgtgtactctaacttagaaattaacctgtgactcaagtaaattagagtgttctggtttttacttttgaattagcagttttaaaaaccaaaatgatggttattgggtaggggtttaataagtcagcacctgggacagaagaatgggaaatgacctcacctcctgcagcagactggcagaggtgactagcgtctcggtggtggcggggtctggttgttcagggcagccacaacctgtatcaccaagtaaccttggaacactcttgtgccaagacttccatttttaggaatttattctagggaaagaactgggtgcgtgcaagtgtgtgtcaccgctctgttcagtgtggtgaagacttgagaaccacccacacatctctcaggaggaggctgggtcaatacatgactgagttgacacatgctgtgatattgtgatactgtacggttgtaaacagggaggtcagccacatgaagtagttaaaacagctaatggaacctgttatgtaggatgactacatttatgaaacaaaattatacgtttatacatgcattaaaatgtataaaatgcacaaaaaggcataaaatgggaaggatgtatccaccctgtgcaaagtgtgtcatggaattatgggagggccgtccctttctattagctcctttattatttctatatttattatttttttttgtgggggatggagtttcacgcttgttgcccaggctggagtacaatggtgccatctcggctcactgcaacctctgcctcccaggttcaagcgattctcctgtctgagcctcccgagtagctgggattacaggcatgtacgactatgcctggctaattttgtatttttagtagagagggggtttctccatgttgatcaggctagtcttgaactcctgacctcaggtgatctacctgcctcagcctcccaaagtgctgggattacaggcgtgagccactgtgcctggcctctatattgttatttttaaaaatgagattgtattgcttgtccattgagaaaagacaacagagatttcattctgagaaaaaacaggtgtatggtgaactactgaatgccaagttgatcggatctggggcacatcattataagtgactagagataactagaggaatgacaggtggggtgttgagtctagtgtgatcaccagtgttcagtccaggctgagcatgcctctaagagatcaccaggtgccaggagtgtgaatgaggaacgatatcgcctcagtcatcttctctgctaaatgtggggacagagaggaatacaacacaatctctgctccaccgcatcccctcaaatggaaggtggtaaaataccactgggcagggccgagatgctccagggggtgatgagctgggaggtggaggcctggaggagcctgtggtcctggctgcggggtggcagagaccttctgcagtgagcgtggggggtggagggtctgcccccgtgcaggtggagcagcgaggggctggggcctgagcccatggaagagcagggtcattgcagaggtgctgtgtgttctgagaaccccagggagtttagttttgcttggctttgggggcatcctggcttagggagcgagctggcctgctgctcaggggtgcactgtcctgactcatgcccacgtatgacacgtgggaagatacagtatcatgatgtggcgaaacaaacactctttgctttcttcaatgtggggatggggctgtgatgcttcaaggctgggttggggccacaaagtatctggtttgcggtcagacagggacgtccctcgttgggagagtggacacagatgctagtggggagccctgggctgggtgggaggcagcatcttcctccttctcctgacagaaacctccaaggctttgcttctggttacttgctacctgcctggagccacgggtcttgcaggtgcttggtgtggaaacatggtgcagcggggcagcatcgagctgatggagaggctctccaggaccagtggctgaggtgtaggtctgcaggtggggcatggtggggctggggcccgaggggctggagtaccagctctgaagacccgaactgcactgtgtttgttgcagaggagaacacaggtgggagatcaggctttttggaaactagcagaagcttaatttttgagaccgtaagtttaagggaccccagaggtgcagtgggggtggcaggaggcagtcaggggaagcctgggactggaaagaggtgtgggctgggaataggactttgggctgtgagtgctgaggtccttcaggaggatggtgcgaaggacccaggcctgggagtcgcaacctgtgagcaggactgagaagggtctgtaggggccagagaggagccatcagaccaagggaaaccagaagggaggcgagatcaagacagttccaggatccaggaggagggctgctcactcatctcatatgctgccttgaatgtgcaccattagttgggtcagaactgtccattctgatgggaaagttttagagaaagtgacatgtaattgaggaaatggacttttcgtgcatgctacactagagcttttaagttataaaataatatggatttcccatattttttattttttatttttattttattttttttttgagacagtctcgctctgttgcccaggctggagtgcagtggtgtgatctcggctcactgcaagctccgcctcccgggttcacgccattctcctgcctcagcctctccgagtagctgggactacaggcgcccgccaccatgcccggctaattttttgtatttttagtagagacagggtttcactgtggtgtcgatctcctgacctcgtgatctgcctcccaaagtgctgagattacaagcgtaagccaccgctcccagtcggatttcccatgttttgtcctggttcctactgatacatttttttctccaaatgtaaagcaattgttgaccgaatttgagtgatgtagcgtgcaaatcgtcatatagagatcagagtgtgcttactgatggaaactgctgccgttgttgaaatttcttccagcgtaagactccccttttgtcactgctgtgtcttattggaatgttgagtgttggctgtgcgttttctgtcagccaaggtcccatttctctggatggcagtgctatctcctttcttccttacggagtcttgctctgtcgcgcaggctggactgcagtggtgagatctcggctcactgcaagctccgcctcctgggttcatgccattctcctgcctcagccccccgcccggccgagtagctgggactgcaggcatgcgccaccaagcccggctaatttttttgtatttttagtagagacggggtttcactgtgttagccaggatggtctcgatctgacctcgtgatctgcccgcctcggcttcccaaagtgctgggattacaggcatgagccaccgcgcccagctctttctttctttctttctttttttttttttttttgagaccaggtcttgctctttcacccaggccggagcgcagtggtgtgatcacagctcactgcagcctcaacctcctgggctcaggcgatcttcctgccttagcctcctgtgtagctgggaccacaggcatgtgccactatgcctggctaatttttttattttttgtagagacgaggtctcattttgttgcccaggctggccttgaactcctgggctcaagcagtcctcccgctttggcctcccaaagtgctgggatcacaggcgtgagccactgcacccggcaatgctgtcctttctagggtcccttaaagacccttgactacctgcctttggccacctcctgtctctccatgccttgggtacccagggccccttgcttcaagctttgctgtttcgggctagtttagtaccagaaccacttccttcttgctcgcagactgcagggtgtccaccttggaaagatctgaaatcagccgggcagcagtatttgttttgtcctagctctgtactaggagctgtattgggcatagtagtaacatggaagagagattgaagggatggcccatgtgctttgtattattttaggaaagaatgggaagaaaaaaggcaaaaataaaaattatgccaagttaaagttgagaagaattcaggccaaatgccccccttttattgatttgagggactgtttggtcagccgaggaagggcacatgtctcatctgtacccaccagtgctgtttctcactccatgcgtcctcccagatcagtgtggtagaaaggaggcagcactggcccacgtgggggtgtggagggcgtggccctggtaaatgtgtatgtgtggggtttgacaatatacagagcctgcccccacccagggagggctgaacagtatatccataggctcctggcagccccgctgggctgagtaccggacccacattgtctctgttattccctgtactcgccgcttaaagggaagcttggagggacaaagaagcttgctgtcaggaggtggaggcacagccaggacttgaactcaggtctgtggatcccagtccgcagcctggacggcagtgctttataggaaggaggtgaggtcctgctgtccatgtccacagctgaagagccaggctctgcgagtctacgtggcttccctgaacatagggcctggcaggttcctaaaagaagcttcccaggagccctttactgttaggagcctgaggcgccagtgtttatgggcaccgaggggaggagaaaaacaagcagtgaagctcagacagaaaggataccctcgaacaagagctgaggctgtggcagtaactcttatttttcccttttttaggttgcttataaaaagggagtcaaacatctttctgctcttcttgatccagaggtcctgtccattttcgtgcctccttttatcagtaaagaggacagtcaaatggccggtgccaactgcggcactctcggtaaaacccggatgcgctccttgagaaagaagagagagaagcccagaccagagcagtggaagggcctcccggggccccccagagcgccagagcctgaggatgtcgccgtcccgggcggcgtggacctcctcaccctgccgcagctgtgcttcccaggtatgtctaggaggtgggcaccactgggcgcctcctgctgccggccacccagagtggtctattcccagaaacccacaggcagagggaagtgacgtgagcggcagagccagggacccctcactgcctcctcttgtgggatttagttttcttaatcttggggatttttttaattttttatatttatttatttatttatttacttttttgagacggagcgtcactctgtcactcaggctggagttcagtggcacaatctcctttcacttcatcctctgcctcctgggttcaagtgattcttctgcgtcagcctctcaagtagctgggattacaggtgccaaccaccacgcctggctaacttttgtgtctttagtagaaatggggtttcaccatgttggccaggctggtcttgaactcttggcctcaagtgatccacctgccttagcctcccaaagtgctgggattacaggcgtgagccaccgtgctcgacctaccttggggattttaaagctgaaggaaatgtaaatcattgcgtgtggtcccggtgttttggagaattgagtcctggaagggagtctgcatgaacttccaggtaaaaccatttgttcctggtgcattcaaggcttttcccctttgacttaaaatgaagtcttgcagtggttggcagatggattaaaaatacatccagttcatctgcagcggttccacccccagtgtgcctgagcctctcccttccacctcccgttttccgtttcactggggcaagaagcacaggcctgcacttagtccccaggctcgccagttccagttaacaggtgagcttgcattttggggcgttatttttcctgtggtcttcaggaatgttaaaatggccgaggtaggaaactcagacgaagcacctagcataagcacccacctcagaacttggtgctatttcctggtcacagggattataaacctgggacaggcgccaggtgggcggctgtgcccagcaagcactgccactggctggcaggtgcttgagagcttgtaaagaaattgctgtgtggggagggactcagggaggatagacggccggaggcgtgatcggaagaatgaacccgccttggacatgaaggcaccaccactgctaactgtggaggtgtgtcctaaacactgtgaagaaatcagctcgtgggtaacccaggccacttggcaagaacaggattcttctctgtctctttctgcctgcagggggtgtgtgcgtggccactgaacctaaggaggattgcgtccacttcctggtgctgaccgatgtctgcgggaataggacctatggcgtggtggcccagtactaccggcccctgcatgtaggtggttcccgttactcccctctgaaattgggtttagattttttattatggtgaaatacacataacacaacattcaccattctaaccattttaaagtgtgcagttccgtaacattaagtacattcacagcattgtgcaaccaccaccaatgtctaggtccaaaacgctttcatcatccctgaaaaccccataccattaagccttcagtcctgcttccccttcctgcctggcgatggctaatctgcttgctttttttttttattgagatggagtcttgctctgtcatccaggctggagtgcagtggcaccatctcagctcactgcaacctccttctcctgggttcaagtggttctcctgcctcagcctcccgagtagctgggattacaggtgcccaccaccatgcccagctaatttttgtgtttttagtggagacggggtttcaccatgttggccgggctggtttcgaactcctgacctcaggtgatccacccgcctcagcctcccaaagtgctgggattacaggtgtgagcgctgcgcccggccggctaatcccctttctgtctctggatgtatgtattctggacacttcgtgtaagtggactcatacagcatgtggcctgcttgtctgacttctttccctcagcatgttttgatgttcatgtgcatgggcgcgtgtgccagtgccccgtggccttttatggcgagtgacattccatcgtttggatggaccacattttatttctccgtgtatccgtcgatggacctgtgggttgtttccgccttttgtctttggtgtgagcgactggcgtttagactttacaacacattacatctgtcacacatattgggagtgttgtctgggtagggccgtgtgtgtgaatcagtgggcctttggggaactcgtaggggaaacgatgtatccaaaggtgcagggtgacctgctgcacacgtccagagggtttcccgaagcaaaaagcgagccggagccttaatttaggtgccctggtgccatgaagggaagtctgtgagttccatgcagtcgagagaaatggctggcctggattccctcggagcccgggacacgtgtttttgttggtagaagcgtgcttacacatgtgacattgagtgttgggaggcgtgaggtataatcacatggattctgtccctgtaagctcatggggcagcacagacaggcccggatgttcttaatgaatatgcaggagcaaagcgtactacttgatgctctgaatgcataatcttaggtttctgggagaggtcattttcacagtgtgccaagagcagaaccaaggtcagctctcgggcggtgcatgcaggggaccagcgtccgcctctgtgacctggctgccagcagccccaggcctttcttccagggttatgttaatggagggatgagaggaaggtgcccctccacgtagccagtgttccagatgagaaaggatccacgatgttggatctttcagaaaagcaccttgggagtttgcttgtgaaataacacttaccaggagcaatgcgcatgttgttttcgttatcattaaatataatacatattaaaaaaaggagcagtccctctggtttgcatgagtacagcagatgccactgttcccagtgtgccggcctggcgtgggcatgcctggtcctgctcctgccttcccagcagctgtgtagtttcggggtatccccaggtcccacagcactcatctctccttcttcactatgtatccggatgacgctatatctatcgtttttttctttcttttttttttttgagacagtctcgctgtgtcacccaggctttagtgcagcggtgtgatcacggctcactgcagccttgaactccagggctagctcaagtgattctcccacctcagcctcctgagtagctgggaccacaggtgtgcaccaccatgcccggctaatttttcttattttttgtagagatgaggtcttgctatgttgcccatgctgatcttgaactactggaatcctgcctcagcctccaaaagtgttgggatgacaggtgtgagctacatgtccagcccccaactatcgttctattgataacacagccccagcccctctcatacactctcctctgcctttccaccgacactacgtgacttgagggtgggaaccatattgtgtctgggtagctccagctcctcccgggctactgtaacagtagcagcagcagccacgcgcgcgtgtgagcagctcagcaccaggcatgacgtaagcactttgtgtagtcattcatttaatcctaaccacaacgaatgaggttgggagatgacagatgaggaaatggtggcagagagaggttaaaagacctgcctgagatgacagagcaggcagggttggaacttgagtagactgaccctagaaaagtggatgtttattaaattttgttagatagacaaatgatgtagctgactgtttcctgatgtctccctttacctggatatcttataagtaccctaaattcagcaagttctcacactgaagctatcatcatgcccttccatccctacaaaaaaccccaaactaacaacacttccccagttggtgagccccaaatactttgccacttgtaagttccacagtgtgctgggccttctagaaccctgcggccgtggctcccacacaggctgaggcctctcctgctccgtcctcctgggcacgtgtgggtgccgcttcctgtgcgtggcccctgcattttctccccttgtaaagcagagtcctttgtgtgtcttgggtcttactgtgttctaatcgtgtgttcctttttatctcaaggctgtcagcttctctggggcaggaatgcatcttgctctctttatagcctcagcacctcaaatggtgcaagcaccaaatagggaccccgtagacttcgaccggagggccggtgctggcttggacgcgttgcaggggtggggatggtggactctcagcttgctgtgtgctgaaacgtgacccagttggaaacagatactggaattgccaaggtggggaggtgaccatgtcgctgttgcttttcatgtaggatgagtactgtttctacaatggcaaaacgcaccgggagtgtcctggctgcttcgtgcccttcgcggtgtgcgtggtctccaggtttccctattacaactccctcaaggactgcctttcctggtgagctggggcaccgggggccaggggtggtagggggcagctctttgtgcctctccaggtgagccaagggaccagggggctggaggtggtgggggggcagctctctgttcctctcctggtgagccgggggaccgggcgctgggggcagtaggaggggcagttctctgtgcctcttaggctgttgcttaaggctgggggcagtgggcagggggtgtggcagcgggcgctcctctctgtgactggtaacatacggtaatggcatggtaggaaagggatgaagccacactgtcggaagtaaggttgatgttcaggattttcattttgtttagtttttcacaaaaaggcatatattaggaaaaactcttttcctagctgagaatattaggaggctgctgtttgttccaatgagttttattgacattttaaagatgaccttggctgggtgtggtggctcacacctgtaatcccagcatattgggagactaagatgggaggactgcttgagccgaggggtttgagacaagcctagggaacatagcaataccctgtctctaaaaaacaatttaaaaactagttgggcatggtggtgtgtgcctgtagtcccagctactgggaaggctaacgcaggaggatggcttaagcctaggagttcaaggctgcagtgagctgtgattgcaccaccacactccagcctaggttacagagcaggaccctgtcatcttgttttgtagaatctgtaactgtctccctgctgatggtgagtagaaaggctgaggacgtaaagaacttttgaaaaatcagaaagacatcgtatagaacccagtgggctctcattatcaaaggatgcttttgtgatgttgggggctgtagcccaagttcagacatggtcagtcccagtgggcacttgtgcacggagccgtttcttttgagtctcataaagttacagtctgagaatttatatttgtttgattaaaggccgaggagaaagcagttaacaacagttcccttttgtgtcatcatgctggagaatgagccacggcaaatcgctgaattggtgctgttcttgcttcttgcaaagcacagtcatttgagaccttctgccttgaccagagggacgagccccatggagagtgagcaggaaccttactgttcaaatcaatgactcgtaattcaaatcccagcactttagtggtttacttcttaaaatataactggcttttggacatagtttgggtctagcctacattttattgccatagacataaaatatcgttgagaacagagaggtgacttggtcgtagccaatgagcaggtgaattgagcacatgcatgtttgttgactgtctgtcaccagcgcccaggaagtgacagaatgccaagcctgtacatggtccccttttattcactaactgatgatcttcattacttgaaggtaaacagcgttttcactaatctctagtttcctcttctgtaaaatgtagatggttatttccaccttttgtttgctgaaatgaatgggtggtcgccagacacatgcccttggaagacaggaagaaaggaggtgttttctccgcctcctggtcgatgttatgtgtgtttattcagcaactgacctttcatagtgtgattggcaacagatatcctcctgctagacattaaagcaaacacatatttaacttgaaaatgtgttcattttcatgcttctttctttctcattgcccattgctgtgtgatcagaactagaaggggcgaaatacagaaacagaatacagccagaagaggcaaacgacagaaattcaaattgccgtatgacaacacgaatttgtagttttaaaaaaatcggttctgttagtgtgataatatgcaaaatatgtctccacgtggacaaaaaatgggcaagaatatatttagttgtgttttgggaatcagagtatgggtagttttttttaaatttttttttattatactttaagttctagggtacatgtgcacaacgtgcaggtttgttacgtatgtatacatgtgccatgttggtgtgctgcacccattaactcgtcatttacattgggtattttaattttcatttacaaatttttttgagagacaaggtctcactgccactgaggctgcggtgcagtgccgctatcatagctcactgcatcctcaaactcccgggctcaagtgatcctcccagctctgtctcccaggtagctgggactacaggcgcacaccaccacaccaggataatttttaaattttttgtagagacgggggtctcactatcttgcgcaggctggccttgaactcctggcctcaagtgattctcccaccttggactcccaaggtgctgggaataccagtgtgagccaccgcacccacccctcttatagttttaaattgtatacagtactttaaaagtcagagtccattttggagacagactttctcaagcactctccttccaggtgtttgttcttttattccttaccgaggtaaaacacacgtacagacaaacgcacaaattccagtgatttcccacaaattgaacacacacatgtaactagcacccagatgaggaaacagagcatgaccaggacttccccttccaaaatatacctccctttgtgccacctgtcaggcactaccgcagacctggggccactctgctgtcacccagcagcttggtgactttgcttttggtgaaaggtcctggagctgctgctgcagacgctggggagattccagtgtgattagaaacgctaacgatgacaactgcgttctcatctttattttgcggtttgagttttgtgtttcgaatttcagtttattggctcttctgaagccctgtaaagattttgaagtggacagtcatataaaagatttcgctgcgaagctgtctttaatacccagcccgccacctggaccgctccatttggtaaagtatatctgaaattatattgttttttctttgcaaatagtaaaagtaagatgttgaagataatgtaaatgctcacaactatttctgaagttctagctgttgtaaacctaaaataacatcctaacccccccgcctccccacagctgactgactggacccccttttggccaaggggaccccagagaaacccaaaaaacagaatgactggccagaatggaagggaggtcagacacgcctggttataccctctccctcttgcgtgagtgtatggggtgtttgtgtatagggttgtaaactaaaacgaaaatcctaagcctccctactgactgaacaggttccctcttggccaacgggaccctagaaaaaccttaaaaatgaaattcccggccatgacaggaaggaaggtcagacacgccttgttatgcccgctcccttttggagtttaggcacagctgaccagcattaggttaaaatggagatcctaagaccgacagaacagactctctgtggccataagattccaaattatgaacaaaacctaaggtcacacaaagcaagggttaagtcactccctacaaaccataagagctccttaaacaggtataatgtagcttactttccaacctgactctggtatagcatccatgacagatagcagaccctgaagaaaatcaaagtattttactgcaaatatgtttctttgacatattttgaaatggcactgcaaagctgtcttttgtgggggaaatttgcatctgtagagaatctattcatgcagccaggcctgccttcctaggcctttgccagatctaggagagatgaactgagagcctgacacctttaaagtgtgaaaagagacattcaccatctcttctctctgagggctgccacctgtgaggcttcatttatgtagcaagggcctcagccgcacacccccttatcttgactcaggccttctttcccactgacttcagatctttagacagtagctcatctttctcaaccaattgccaagtaaagaatccctgaaacccacctatgacttataccctccttcctctttgagatgcctcacctttttgggccaaaccaacctcaaccttccatggactgatgtatgtctttgcctgtcactcctgtctctgtaaaatgcataaaaccaaactgtaacccggccctctggggaccactctttagactgttccctaggccacggtcactcagaataaacccctttaaaatatttgatagagtttggtttttccattaacactgtgcttaaattatgtttctcaaggtccttatgggaacattttatatactcttcctaaaggtgaaaagttaaatatttagacttgagttttgcagagtgggctgtgataaacagagctagtgatatgtcgtggcacttcagtggttagcatgtcagttcatagctccctatgcagataatacatggaaacctgaatccttttatagaagaatttattcaaattacagatttttcatttatttgtttatttgtctttaatattgaatattatatatatatatatatatatatatatatatatatatatatatatatgtatttttttttttttgaggcggagtcttgctctgttacccaggctggagcacagtggcgtgatcttggctcactgcaagctctgcctcctgggttcaagacattctcttgcctcagcctccagagtagctgggattacaggcgcgtgccaccacgctggctaattttttgtatttttagtagagatggggtttcaccttgttagccagggtggtctcgatctcctgacctcgtgatctccccgcctcggcctcccgaagtgctgggattacagcgtgagccaccgcgcccgccctggatattgtatttcatttgttagtgttttctcttgtacagtgtgattaatgagaagtaactggttttatattttttgttactcttagatgtagtgctgtgttacttaatgaacaggcaaacatttcccaggctggttttttttctgagagatgttattggcgatttcaagacacagggtttggggttaagtgaagctggagatgtggctggccaccttccccttttgtttgttgagaaacatgtcaggttgctcagctatgtgaagaaacctgtttgactcagcatgttccaaactaattttaactgtacttaggatgctgctttttattttttcctttaatagacacccgtcaaacgtctcaaaatgtttagtaaatgtcgattcagtttcattgtgctagtcctctgaaagattatacgtattaatcttgatcttctacatttttctttactgacaatggaaaaaataagtttcttgtatcaaaagacacatgattgtgaacttaaaatgtgcgtttttaacattaccccaaccccagcagtctgctgggtggaaaatcctgccggtgcattccagtccagatacgcagcaggccacccgtctctgtcagctctgctcccagaagcctttgtagggcatgtttatcggccgcgtgttttatgtggatagttggcattttcttgtcaacagtatgtgcagtgaaatcatcaaagtttatgttcttgttctgtaaacgcagcaagtatttactgagggcctgtgagatccgtgaacagagccagacctctgacttgagagcagtttcagggtcagcagtaatgagctgcactcggcctttgaacataaggaatgcgtgcgtagcactcccagcgctgctccgggtctcctggcccgatgactctcggctccttcatctcgacgcacccgtgaggaaggtgactgagggttgccgctggcctgctcttccctcacccattccgtccatcactcagcctcgccggactaccttcagtgttcctttccagtttgcccatttccttgctgccacttcactctgggtcaccagctgctccccgctgcgtgacttggggaccactggcctgtctgctttggttcattctccacccttccatttgtcctctgcacagtggctgcagagattattaacatgtggatattgggctttgcttctcttccccaagccccacaacagtttctcaccgtctaccttcctcagtcctgcagcctggaccctgtctcactgtccagctctgttttatgccactcccccagcgtgctgatgtctggcctcactggactcctgtccattccctgaaggtgccgccacagggcccttgcacacgctgtttccacaaacactgtttcctccattttcttgtggccagctgtggctcatctctggtcactctcagcggtcaggtcttcggatcgtcttctctgagtgacccccactccccgtctctccgatagcacccagttctcatcccgcagggcacggcacagtttgtaattagggcttctgtgcatgtgtttttgtttaatgttcgtctcccccatcagactctgagctgcacgaaggtagaggccacacccagcaccgcatatccagagctcacagccgggcccgcacagagctgcccagcagtgagctgtgtggtgggcgagcgtgtgcagggatgcctcggattgctgtgttagccagtcagtgcctgctgatctgcgtcccgtgcgtgtgtctgaatgagtgactcagtctgtatcgggcttgactcagtgcagctctcccataccaagtctaattagctactggctctaagttggtataatgcttgtgatctgttttagggaatgtcatacatgagtgtttattgttttgaataaatccaagaggtcagtgtaggccaaggttctcatctgatgcaggagccaacccagccatattttctagaacccactgcaagcttagaggctgttttcgagagcagtagtgagatgggtcttgtgttttgaatgcgtgtgtgtgcgttcctcattacttctggtccgggttatctctgatctatgctggtggaaaggagggaggagggagggggccccatggcacagggggtagaggacagagccatgccctgtgccttgattccctggttcccgttcagcccccttcctctgatggtgcatggaccaacagccggagcagggcaaagactagaaacagccccactctgcgctcacctgccttttcttgccctccagcgggactgattttacttgctttgcaaatctttggcttaattgggtgtgcaaaatctcacacacacacacattcttctcttgtaccgtatctgagtcattttctatgttgctttgtatgtgacacctgttctttcctggggctcaaatcaagctgagatttggaaactgtttaccttaaatatctctctcctcagtctgttcatctatggagtgggtgaaataacagcccacttcagagagtatgaatattatatgctggaaaatctctagcatgcacccgagaccaaccaaaggctggtggagtgattagcatttgtatttttttttttaatctttaattggatagctggtcggcacatttgttttttgaaatattgaaaatgtttcatgtaaagttgacaattattaatactgtgccacaacttggataatttaactttgatttcttttcttttacataaagaactttattcacataaatgaatctgcctttttttttttttgagaggagtttcgctcttgttgcccaggctggagtgcaatggcacagtctcggctcaccgcaacctctacctcctgggtttaggcgattttcctgcctcaacctcccgagtagctgggattacaggcatgtaccaccatgcctggctaattttgtatttttagtagagacaaggtttctccatgttgatcaggctggtcttgaactcctgacctcaggtgatccgcccgcctcagcctcccaaagtgctgggattataggcatgagccaccacacccggccgaatttgccttatttttaacatggcttgcttctgtacacaaattggtaacaagaaagcaaagagacccaagcacagtaggtcctcagcgtggctggcaggttctcagaaactgcaacattaagccctgggtcacaaaatcaatttcaccataaactaattgatgcagacaagagttaagttcctatggcatactactggtcataaaaaatcaccaaacttctaaataaagacccaaagcacttctgatattaaacattgaagtaaatgggagctgtacacacatttaagaacaattaattaaagtaaggaggaacatcatttacctgcttattgcagttcagggttgagggtggacggaggccatcccggcagcttagggccaaggcgggaaccagccctggccggatgctgtcccatggcagggccaatcccacgctctcccacacttgctcacacggggacctgtccatatgtgccggttgggcttcaggaggacctggagaaaacctagccgggcacgggcatgaggagaatgtgaaggtgtcccccgctgggacgcgattcctttttctcatcaacattataacaaaacgatgttattcaaggacctgcgtcttgttaggaagcaacgctggtgtccccaccaccaagaaattaccaccttttcttgttttcagtttctcgtgtgcaggcatgcttagaatacagacttgggagactgggagaaagcagggccacgggagaccttgtttgtgacctgttttctccccccggctccctgcttcgcttgatttcttaccctcccaggtgttcccttgatggagtctcagctgtctgctctgatcatgtctctcctttctgtttccctgtgctttgcttacacttagatccgtccattacgctcgtttcctggagctttgggtgccgagctgggcacccagcatttcctgagggcctcccacgtgccagcacccgggtggcaggaactcgctgtttgcagcccatttcctggcaggctcagaagccctccctcagtgaaggaactgaaccttctcctctggatttcctccgccaggtccagccgtgtctcagtagccattctgtgaatacagaatttgaactgaagtgtgacttcaaagtaatacatttagaaaaacgtctttcttaaaatttgaaatgcacatgtcttgaaggagctttgactattaaattgtcaaagctattaaaagagagttcatagcatacactaactaaaaagaatatgtaatacctaagaataatttgaacatgcttgatttagaatttgtgttaattgggacaaatatctgtcctgtagtttatctctgtctagacaatgagtagtttgctgattaattagagcttaaggaattttggcttacttagaaaaagacattaagtacttaatttatgtttgagcctttatcggcagttctgtatatctctagaccgtttggttattctgcagaatttaacgtggcagcctgtgtcttcagaaatgttttctaactctgatgccctgggcaccgaaatagtgacagtagtgcacgtcagcctctgcccggagcagctctctgaactaatgacgggaactggttgtcgtaggtatttaacatgaagtcgctccagattgtgttacctgcccgagcagaccccgaaagccccatcctggacctggaccttcacctgcccttgctgtgcttcaggcctgagaaggtgctacaggtacgcggccccgccccggcgagcgcgtcttgtgctccctgccttagtggggcatcagagcaacgatcagagatgatgaagatgcgagtttattccacaatgcaccgactggtatactcgaaatgtttattattattttttaaagccaatgttccctacagtgcatgatatttgcaaatggcaccctttgcagagtctcaggtggcttttgtttggcagatggagctgagggaccagggaagagcccgcagtcagtctggtttggttgggtggtgtgtttatgagcattttctctttattgtactgaatcagaagtgtgtacatgggccgggtgcggtggctcatgcctgtaatcccagtactttgggaggcgaagtggaaggattgcttgaggccaggagtttgagaacagcctgagcaacatagggagaccttgtctccacagaaaaattttacaatgagctggatgtggaggcacgttgctgtggtcccatctgcttgggaggccaaggtgggaggattgcttaagcccaggagttcgaggctgcagtgagctatgatcacaccactgcactccagcctgggctgggcaacacagcgagaccctgtctgtattttttttttttttaaaagcatgtactcagtgcggcgggttctcccctcagatcctgacatgcatcctgacggaacagcggatcgtcttcttctcctcggactgggctctgctgacgctggtcactgagtgcttcatggcctacctgtatccgctgcagtggcagcaccccttcgtgcccatcctgtcggaccagatgctggatttcgtcatggcccccacgtccttcctgatgggctgccatctcgaccacttcgaagaagtcagcaaggttaggtagcgaacctttgacttggaatgctaaattcctgtgagtccatcacggggacacatgggaagatgcgtctgaaagtgctccgcggtgaaggcggggtctgtgtgccgcagagaggtcacgggtaccgtgagaagtggctgttcactcactgtgtcattgtcctgtgatgaagccgggaccccttagtctcctagtggagacaggacagtgagtgtgcccacctcattgtcccggtgagggccgagtgaggcagtagccagcactgggcctgcagcaggtgctcatagatggtactgttgtgacccctctgtgaatctgacacagcatgtttttagttggtgagctgatggatttgtgctaaatattgcaatgatgccaggaggtggactgggtttggtttttaaaaatagctttattgagatacaatttacatacctcaaagtttacccaattaaaatgtatgaatcagtgggttttaggatatttatagagttgtgcaatcatccgccgtccaattttagaagggaaattttcatcacacattagcagtcagcccccagggcctgacagccacacccatgcgctttttctctgggtttgccggttctggacctctcgtgggaacagagttgctccatgcgctatccttccatctggctccttccacttcacgtcatggctttgagactcctccacgtggtagcatctctcagccctttatttttattgctgactagggtttcattgtataaatagaccgagttttgtccatccactcacaatgaggtcgtcgtgataaaatcttcatcacactgttcagtgatgaccgtgtgggttgtttccaccttttggctgctctgaacacttgtgtgcaagtttttgtgtggatatgtgctttcgtttctctcgggtgtgtccctaggagtggaattgctgggtcataaggcagctctttgtttaaccctttgaggaactgctaagctgttttcgcaaagcggccgtgccgttttacactcccaccagcagtacgagggttctagcttctcctaacgtccgcgccagcgctggttgttgtctgccatttgaattgcagccctgcccccgacccggtgaggaggagctggtatctcactgtggtttgatgtgcatttccctggtgacgaatgatattgggcatcttttcctgtgttattggtggtttgtacagggtcggtttacatttaactttccattttgaacaatatctttctttttttttttttttttttgagacagagtctcgctctgttgcccaggctggagtgcaatggcgtgatctcggctcatggcaaccaatgcctcccgggttcaagcgattctcctgtctcagcctcccgagtagctgggactacaggcatgtgccaccacacctggctaatttttgtatttttagtagtgatggggtttcaccatgttgcccaggctggtttcaaattcctggcctcaagtgatccgcccaccttggccttccaaagtgctgggattacaggcgtgagccaccacgccttgctccattttgaaaatttctaagtgtgcacaaaaatagaagaacacagcgtgtgtcatgcgcccctcacagtcctcagcctgttgccagcttcgcagtcacccccagccccgcttttcccggagcgttttaaagcaaatcccagggtccagatgcttcccccacaagtgttgggaagggcccgttggctgggcccggccagggtccccgctgcgggggagaacagtgcttgtgtgttcctgccaaggcgagtgactcactggggaaaacacacttcaggaaaaggccaggcagacctctgtggaaggaacggaaaagcgtcatccatcccgcctcgcagacgaggagaaaataagctgtgttgtgaagtttaaagttgtttctttttttagtcattaggggaacaaaattgtgtttcaggctcttttaggaggacaactttcttccacatgttcacctagcagttccagtcagcagtgggggacacctttgaggcactcacctgttgggaaagatttcaggagaggcagctgctcttctggatttgtttgggtgttttgtttttgtgttttgtggctggcggtgggatctgcaggaaggagctggcagtgaccctatgcgcctccaccaaacacttgtgtctcccaaagacgctgggcgttaacacatccacgggaccggctgtgtgcctcgctgctttagcgttttgtgtatttgccttgtaaggttttgaggccaagaatgtgtttgcacatatttcatgtagccacctgaactgcactccaaagggcggggcccagaatgagagccggggagtcggggccttccccaggaacctggcattgcattccggggctgttgaagtgcagggctcgggtgcgtgactcagtatttgtgtactctgtcacaggagcctctccaagtcatcatgtgcatatctcaaatattccagggctacgcggtctcttagcccaggcccctgcccatgctctggtgcttggaggggcggagctggctggggagctgagccaacacagtggatgttggaggttggtggtgccctcactggagttctggaatgctccctccaagactcccaaaaagcagtacatgcagtgtttgttccagggtaggagaaaccttgtcaacaacatgtattggaatcttttttttttcttttttttttttgtgagatggagtttcgctcttgttgcccaggctggagtgcaatggcacgatctcagctcactgcaacctccgcctcctgggttcaagcgattctcctgcctcagcctcctgagtagctgggattgcaggcacacgccaccatgcctgggtaatttttgtatttttagtagagacgaggtttcaccatgttggccaggctggtctcaaactcctgatctcaggtgatccacccacctcggcctcccaaagtgttgggattacaggcatgagccactgcacccagcctgtgttggaatcttcactgaaagagaaaggcatatgggtaagcaaaatgtggtctttccaaataatggactattcaggctgaagaagcaaggatgttctgacacatgcctcagatgggtgagcctcacagacatcaacgtggagtgaaataggccagtcccaaaagaacaaatgctgttcgtgaatccactcatttgaggtccctagaggagtcaaattcatggagacagaaagcagattagtgggcttgtggaggggaggctgggagctgtgctggatagtgagtctcagttttgggatgatgaaaacattctggggatggctgggggagatgcttgcacaaccactcgaatgcacttacactgtcgagctgcacgcttaacattggttacgttgacacagtttatgtttattttaccacaattaagaaaaataagagaaaggcatatttaatcaaatttagcccattaacatagctcatgatatatactagatttttgtgtagaaaatatgaggctatgtgtgcatttattttattttattattattattattttttgagacagggtcttgctctgttgcccaggcttccgtgcagtggtgtgatctcggctcactgcggcctcaacctcctgggctcaagggatcctcctgcctcagcctcccaagtagctgggaccataggcatgtgctaccacacctggctaatttcttttaaattttttgtagagacagggtctcactgtgttgttcaggctggtctcaaactcctgggctcaagcagtctgcctgccttgacctctcaaagtgctgggattacaggtatgagtcactgcacccggcctatgtgtgcattttaaagagggtcatttaattaatgatgacactgtcttagtgaactcaaaacatatttatgtgttttcaaagaggtatacaaattccgaaattcttttatcaatctttacagatgattccttgttttctaggaagccgacggtttagttctgataaatattgatcatgggagcatcacctactccaagtccacggacgataacgtggacattcctgatgtccccctcctggcagcccagacgtttattcagaggtaacgggaaacattaatggtatgaatttcagaccgtctttgttcagattctgtatttgccacttcgagtatcttttccaattttatataactgatagatgttttatatattatagtttggaaattatttgtgaattttgttttctgagattgagtctcactcttgttgttcaggctggagtgcagtggcgcaatctcggctcactgcaacctctgcctcccacgttcaagcgattctcctgcctcagcctcccaagtagctgggattacaggcgcccaccaccatgcctggctaatttttgtattttcagttttcaccatgttggccaggctggtcttaaactcctgacctcaagtgatctgcccaccttggcttcccaaagtgctgggattacaggtgtgagccaccgcacctggccatgaatattttgaaatgaaagtgatttgtctttattccaatcttgtctgaatgttacttcaagtcaagagacagtcacatcctgtctcttgagaggaaacctactcaacctctgtgctgtgccccaggatcctgtgcctgtgatccttgaagttccctatccattcattcattcattcactcattcattcattcattcattcactagatgtgtattgcatacccgtcgtatacccggaattgggcagtgcctgtgtactaatgacaggacagccatggcccctgccccttgagtttgtctgctgggttctgatgggcatgacgcattctgtccgagctagaagttgtccatttctttcactcccgccactgtattggcactttatcttttctttttctttccttttttttttttttttttgagatggagtctcgcactgttgcccaggctggagtgcagtggcgcaattttggctcactgcaacctctgccttctgggttcaagcgattctcctgcctcagcctcccgagtagctgggattgcacctccacgtctggctaattttttgtatttttagtggagatgggtttcactatgttggccaggctggtcttgaactcctgaccttgtaatctgcctacctcagcctcccaaagtgctaggattacaggcatgaaccactgtgcccggcctggcacttaattttttcacaccgttttatagtttatgttttctttcatctctgttactcaacctcattggcttagatcaggcgtcagcaaactttttccaacaagtgtcaaataatatttcatgctttggggctctgaggtctctgtcgaggtgcaaaggcttggcagggactttggtcaggggagggtgagaggaggtgtaattgctaattacgtcaggacggaggtgttgggtgtgccccaagcagtgactcagcttcagtgccagggctccctcggggttgctctgcggagctcatttttcccttcagcattttataaaatgatagcaggaggagagatcctgctcttgagtcctcacaacctgtgggtccaactgcagccaggccctgagtgcggtcgtggaggtgacgctggagggaggggagcgcttaggctttttgcaaacagccgggctgtacttgcttctggtgaagcctgtgatgcagtctggatttcagtcagccatcacctttcttctcttcgccttcctttgtctgcattgggaggagtgggaaggaggagggcggtttctggcctggcctttcacctggcttttctgatttctgactcttaccttggtgtggattattccttctacctggaaggtttctgaaaaatgtttaggaaaactacctctttttttttttttttttggagacagggtcttgctctgtcacccaggctggggtgcagtggcgtgatcttggctcactgcaacctccgccttccaggttcaagcgattctcctgcctcagcctccggagtagccgggattacaggcatctgtgaccatgcccgactaatttttgtgttttcagtagagacagggtttcaccatgttggccaggctggtctcgaactcctgacctcaggtgatccacctgcctgggcctcccagagtgctcagattacaggcgtgagccaccgcgcccagtcggagaactacctttattattgttcttgcatcttaaaaaattccctaaggccttaaagccaagcgatggtcctgcacaggcaaggctggtttctgcttgcttgggctgtggaatcgctgggctctcctccccagccaagggcacctgagcagctgttctgttggcaactgtcctctgcgcgaactttgaaggagacacgtgctttcccaatcatctcagttactttctggtaagccacagctgcttccttgacttttagagcgtgacattctgtaatagaactgagctttgtgagactgtgttgaagctctgagcattcccaggaaggtaggattctgcctgcatcctcatcttcttgttagaattccggaatagaaacacacacgatacggaggctgggccccgctttggctagatcccccagaatggggatgcaggatgtcgtgtctcccacagcctcatttttggagactcttttgtaaacacaagctaatccctgtgccatgggtgacctgtctataagaggcctctgagctcatgatacaggttgtgggctgcggtgtcgttggggtgcctgctcaaggggctctggagtacaatatgcatctctctgcacgtgagcgtgtggctgggagggacggggcagccccctccttgcccagctttccccagcacccttggctcttggtcactctcttcactgctgtcttcatctctgatggaagtcgctctctccctgggcagcaggggtagggtcgccagctcagggctatgctggctgcgtgcttgggtgagggaggcatggggttccgggagaggggatggccatctccttcagaccccactgtccctgcaccagaagatgcagtaagagaagctgccactccaggtggcatcatagccctttttacatgaggaaagtcatcaaaatttctttccctggcattctgcgtgttctttcagatgaaaggccagtttggtgctggtaaacatcacagttcttgagacccatctaggcaagggtagttgcccaagtcctgtgagtctggtcagccagggctgggctggcccctcagcagctgctgctcagcacgtttggagagaaccctggtcctggccctggcaccgcgtgcctgcctgctaccatcccctggtgggccactccacccagaatcccgttcttcccttttcctgtccctgcctccaggagggtcaggcagcggcaggggcctgtggccagtgcacccttcccatcacagagaagattggctcctgccggccatgctgacctggcccacactcccactccccctaccatgctgggccgcactgggtccatcaagtcccccgtctgtgtcttcctgtcacatctccggttccaggtcgtctcctgggagaactcttctctgcccgctcagtctgactgccgtgtctctctagcccatcgctgtgatgtgcgtttctgcctgatgtcctcattatctcctgttttcttgatttgtctcttttcctacttcctcccactcacatggaagtgccacgcaggcaggggcttggcctgtgtccaccacccatccctagcacacagatcagtgtatggcatacagtaggtgctcaagaaatatgtgtgaccagatatgcgttggttctgtttattttgtatatttctaacgtccctctagacatgcagcctttagtggtgttgggaaggccaggggtccaatctcatggtggctcagggttgacagatatctgtgagttcctgtccctgagtgaggccctctggggtgagcctttggccatctcctggtgggccaagagtggtgacacccgggacgtttgttgcagggcacagaggggcatctgatcctgcctgggcaggaagtacagaggggaagccatgggggagctgtgactgtcccttctaggcagccatgagtgacccgtcaagaggcagcctgacctggaagcctttggtgacctagaagggggagtgccctcactgcagtggcaggacaggaatgagctggcctgggtgaagtgtgcatagtccaagtcgaggcccatgtgagtccatgtgtggaggtgaatccactcttccagtcttccagcgatgtatttttttttttttttttttaagacagagtttcgctcctgttgcctaggctagagtgcagcggcactatctcggctcactacaacctccacctcccaggttcaagcgattctcctggctcagcctcccgagtagctgggattacaggtgcctgccaccatgcctggctaatttttgtatttttagtagagaatgggtttcaccatgttggccaggctggtcttgaactccctgacctcaggtgatccacccacctcggcctcccaaagtgctgggattacaggcgtgagccaccgcgtccagccccagtgatgtactttaatgaccacccgcccctcaaattattgatcggtatttgtgtctgtgaagtgttcatttacctggtgggctgtgtgctggtgagcggccgtggccagtgctgctggggctgagctagcttcggtctgcctccttccagggtgcagagcctccagctccaccatgagctgcacgccgcccacctcctctccagcacagacctgaaggagggccgagcccaccggcggtcctggcagcagaaactcaactgccagatacagcagaccaccctgcagctgctcgtgagcatcttcaggtacgtgagagaacattcccagtgtccatgaggaggtaaccagccagccatccattctatggggatcgtgcaccccgccccagagggcaggccattagtaccatttgcctggcaaacatgagtggtccccgccccctgccaaagcttttcttgtgactgtaacaatcagcagttacagggagtttgttcttttgattctgaccttgcctgtgccttcctaacaccctctcctgctggtgactgccttcctaacagcttctcctgctggtgactgtgccttactaccttactaacgccctctcctggtgaccccctgcaggtggctgttttgggacagccctctaggaagacgcaaatctgataaacctgcagggagcacctgtcactctggcctgtgctggctccgggctctggctcagtccgtggagggctctgtcccgagaggcctgcatccaggggctagtgagggacagacaggccattttgatgtgactcataagctagatcatgaaaccatctatgggagagccacaggacgggtggggcactcaagatgtgcctgttagcaagttttctttctcctcattccactaattacagcattagctacctcctgcatgctattgcttccccagcacctgagctggaattggttaagtggacaagtcaagtgtgtttatttcagtgtgatacagtacaggtattgagttgctatttctggcctaaataggcagtcacttaaggaatgtatggcaaaaatgatagcttcatagataagtactttttaatgcaaaagcctttgggcttctcccaccctttctccttttctctggcagtgttcttcctctccttcttgctggttgctccctgagtccagcagtgaaggaggcacccccgatgctggcctcctctgttcttgaggggccttccgctttgggaggtggttagcacagagcctgctggcttgatcgtactctgcgtgattatttcaaaatggaaatttgagtggccttttttttttttttttttttgagatggagtctcactctgtcacccagcctggaatgcagtgacgccatctgggctcactgcaactgccgcctcccaagtttaagcaattctcctgcctcggcctctgaagtagctgggactgcaggcgcctgccaccaccacgcctaactaattttttctatttttagtagagacagggcttcaccatgtttaccaggctagtctccaactcctgacctcaggtgatcctcctgcctcgaccacccaaagtgctgggattacaggtgtgagccatagcgcccagcctgaatggcctattcttttgatgtatttgtttgcataaagcgaataatttattaggaaaaaatgggatggtgtattacagacatgtgatattatctctgctcaaagaggcataattagtggggtcctaaatatgttgttttccttttgttctttgaagatgaaatatcttatgaacaatttttttttaatttcttaatattttacaaactcaatgagttgacagaaaagcagaatagtcccagccactccagaggctgaggtgggaggatcccttgagcctagaagtttgagaccagcctgggcaacatagcaagatcccggctctttaaaaaaaagaggcagaaaatatgattacatatgataaaactttatttcccctagatgaaataatttattctctccaagaaaacactgaacacattacgtactaagtatgccctgtaaggttattcattctatttatatattactttagatctgggagatcatgtgctaaaatcgcgagtttgtaacatgatctgaggaaaccgggtacaaagaggtgaagtgggccgggctcggtggctcacgcctgtaatcccagcactttgggaggccgaggtgggtggatcacctgagggccaacatggtgaaaccccatctctactaaaaatataaaaattagccaggcatggtggtgtgtacctgtagtcccagctactcgggaggctgaggcagaagaatcacttgaacctgggaggtggaggttgcagtgagccaagattgtgccactgcactccagcctgggccatagagcaagaccccgtctaaacaaacaaacagacaaacaaacacagaggtgaagtgacttgtccgggaaggctggcggccgagctggtcagcacttggagagtctggctgcccctctgggctccccaccctgaactcagtttcatgtgtgtggaccgcaactgacttttgtgtcttaatttgcataaggaactagtgggctggaggaaggtgagaacaggaacactgcctcctgtactttcgttctagctgggggaaatttatgcttgaccacaaaatacatccacatcgtatcattttggtaatcaagaatctttctgaagaacatggctttttcaaagttcgtatctcttctaaccatttctctgctactaaaagtggtatatttttcatgtatttaagaaagttttagcactcagactctctttctctttgttagggatgtaaagaatcatttaaactatgaacacagagtctttaatagtgaagaatttctcaaaaccagggctccaggggaccatcagttttataagcaggtgagagctgtgggatttgggtgtgcctgtgtgtgttcaatccattatccttttctgtatttaaatacttttcaaaataagtgttctcaagtgtatcaacttttccaaaaagtttgttttagcatggttccttttgaccatgtggctctccctcttttttaaaaaaatcagctttttaagagtataatttacttgtggccaggcacagtggctcatgcctgtaatcccagcactttgggaggccgaggcgggcagatcacctgaggtcaggagttcgagaccagcctggccaacatggtgaaatcccatctctactaaaaatacaaaaattagctgggtgtggtagtgcacgcctgtaatcccagctactcaggaggctaaggcaggagaattgcttgaacccagggggtggaggttgctgtgagccaagatggtgtcactatattccagcctgggcgacagagcaagactccgtctcaaaaaaaaaaaaaaaaaaaaagtataatttacttaaaatatggccattttaagtgtgtggtttgatggattttgacaaatgtacatatctgtatcaccacttcctcaacctggacatagaacatttccatggctccagtctgccccatccctccccaggtcctggcaactctacctgtgtgcatccccgtagacggctggcccatctcagagtcttgcgctgtgcagtcctgcggtctgcgctctgtctgcctctctccctcagcctcctgcctcggaccgagctgggctactgtgtgtctcagcggcggctcctttttttgctaggaatgtcccgtggttgggacagagtgcgctttgttcttctgtccacctgctactgagcattggggttgtttccatttgtgactattacaaaaaaataatcaccttgggggctttgccctggcaggcgattgaagctgcctgaagagccccttgatcctttgggggtttgtttttacagctttggggtgggccgagaacagcctttctctagggttggtttatagcctaacccatctgctaagtgacgtaccctgccccgggtgtctcctgaatggctgaggggtcagccagggccctccgccttggctgttgggagcgtgactggctctctgccctgtgagcttggagagttgttttgcttacagcttcccagtcgttctttggtttgatgcggtttcgccctatgactgggcagcggggtattcagcaaaggcttagggagaccctgatgcaggctccgggagctccctgtatcattccctcctctccagagccctgcccgaggcttccagctgcctcagcctctgtgagctccctccatgccctcagtgctggagctgcgccagccacgagcctgcctctcgtccagcatctgaaaacagtcgtttcctcttttttatcgagtttcctcatagtttatgtcaggaggatatgtctgagccttgtctactgccttatggccagaagcttgtgtccacctcttgtagctatgatgaaatactcttttgttcatggggtgggtatgtgggacccagtgtgtgaatgtatggcagccatttcttctcctgtgtgaatgaggaagagcagaaaaccctcgagttcattcactcagtcaatatccactgggtgtgagtggtgatgcccagttctgtgccaggaaggctcaggggctttggagcagggacctggggagtcggcacagcccagtgaccagcccctctctcttttccaggtcttagacacctacatgttccattcttttcttaaagcccggctcaataggaggatggacgcctttgctcagatggacctcgacacccagtcggaggaggacaggtgcttcactgttgtgttttggatctgcagctctttaggaatcacagtgttcaaggacctcagttttattcgaatgagtaaatgagaaagtcaatgggaaataccttgtgcttagaaactcatgatgaactgggcgacagctaggaagctcttctctccatgtttctacttcttctttttttttttttttttgagacggagtctcgctcttgttgcccaggctggagtgcagtagctcaatctccgctcactgcaacctccgcctcctgggttcaagcaattctcctgcctcagcctcctgagtagctgggattacaggcacccaccatcatgcccggctaatttttgtatttttgtaaagatggggtttcgccatgttggccaggctggtcttgaactcctgacctcaggtgatccacccacctcagcctcccaaagtgctgggattacaggcatgagccaccactcctggcctgtttctacttcttgagggaacacttgaaacgtgcccgatgttagcatgctccccgtggtttgtggcccttgcgtcttcctcggtgctgctctctctcatctcctttctctcttcccacctccccccatcctcaaagcctgctgttttccatctcttccttgctctcttcctgagccccctccaacatgtgtctgctgcagtcagggcccctgttggcttatgctggtttcttctgggcttgtgtctgggtccccctgaggctgcacttggtgagatttgggcaacatgttcttaccagtctgttttccactggtgtccaagagtgtcatgtgctcttcatcacactgggaaaaatgcttagtttaggcttattcttcaatcattattgtgtctataaactaacgcgttgctttttcgtaccccagaataaatggaatgcttctaagtccaaggagaccgaccgttgagaaaagagcctcccggaagtcctcgcacctgcatgtcacccacaggcgcatggtggtcagcatgcccaacctgcaggacattgccatgcctgagctggcacccaggaactcctcgctccggctgacggacaccgcaggctgtaggggcagcagcgcaggtgagggctgccccccactgtggtgctgtgtgtcggtcccaccattcctgcacctgcaagtcattgagcaaaactgggacttgtttcaggagagacgagtgggcttgttttagcagctgagttatttgaaatgtttagaatattcattttgccaaggtatgccttctagaaaattatttctcgtctgtattttctgccacccagtgtcaccgctaaagataacgggggctcggcatggttcggcatccttcacaggtgtaggctgtgcctgtctctgtatgtgtggattgcatgtgtataaatacatatttacacatccacacgtgtgataggaggcagggagcgcaccaggcactttctagagccggagctgtgaaggagcccagtgcccctgccctcgtggagctggcattccagggccagggctaaagtgagcagggccagggatggggagggggcttgactgtggttgggacatttccacagagatgggactgcatggagaggccaagcccagcctcgcgccttcttggggaggtacgtcctgtccctagtgaatgggagaaactgtcgggaggccggggccttgacccccagggcacctgctgctgctgtctcgggcccaggcagcaagtaccatgtggctcctcctgatcactgtgctgggaccccaggagctgcacgagtgacaccttgatgaccccgagggctatggtctagcaggggcagtgcgcatgaatgacagaccacgttgtctttatcggctgagcgctggagctcagagcgaacattctggaggccactgtggggtccgagccttctgcccctggctgtgtgaccctgggcaggcagcttcacctccctggttctgcagttcctcttctgaacatctgtcagtctgccgctggcaggtgccctgtgcccactcaccctgggagcatgctccgctttccctgccctcggaaccttcccctggagcccccatgaccctcctcctgctctcttggtcctctggagctcctgggagaagaggaaacccagcacccagttggtgcctagctcctggagggcccttaggtaacatctatagaaggagttggtgtgagacacacacctggttgaagtgtggctcaggcacttagtcgctgtgtacctgggacaagtaacccaggctgtggaagcctcggtttccgcatctgtagaacgggactatagtaataatacccctgtcctgagttgtctttaaggtaaatgaaacaatggttctaaagggcttcatcctgcctagcaggtacatcttggcttaggctattagcttcatcctcaaataaagcctcagtacccgatacctcagtagtattactagttgtagcaaaccaaattgttcagtgaatgctagctgctattctccttggggtaccatggaagcaaagtgagggttctctcatgcctcccaggggggtgggtgtgtggagctttctggagggagcacacccattctcattttattttgcatccagagaaacattgtccttgacaagatgatgtgacagggacacgtgttcatttggaaggtctgtgctaatggtctccttttccccctgaatgttttagttctgaatgtcacgccgaagtccccgtatacattcaagattcccgaaatccactttccgctggagagcaagtgcgtgcaggcataccatgcccactttgtctccatgctgagcgaggccatgtgctttctggcccccgataactctctgctcctggcccgctatttgtacctccgagggctcgtttatctgatgcagggacagctgctgaacgccctcttggacttccagaatctgtataaaacagacatacggatctttcccactgatttggtgaagaggacggtggaatccatgtctgcccctgagtgggagggggctgagcaggcgccggagctgatgaggctcatcagcgagatcctggacaagccgcacgaggcctcgaagctggacgaccacgtgaagaagttcaagctgcccaagaagcacatgcagctgggcgacttcatgaagcgggtccaggagtcagggatcgtgaaggacgccagcatcatacaccggctgttcgaggccttgactgtaggtaagaggaggcctggcaccatcacagattttattatttagagacagggtctggctctgtcgcccaggctggagtggactggcaatcacagctcactgcaacctccacctcctgggctcaagcagtcctcccacctcagcctcccgagtagctgggactagactacaggtacgcgacaccgtgcccggctaattttagtattttttgtagagacagggtttcagtatgttgcccaggctggtctcgaactcctgggctcaagtgatccacccacctcggcctccctaagtgctgagattacaagagtgagcctctgcgttgggcccatatattttattttactttatttatgagatggagtcttgctctgtctcccaggttggagtacaatggcacgatcttggctcactgcaacctctgcctcctgggttcaagtgattctcctgtcttaacctcctgagtagctgggattataggcatgcgcctccacacccagctaatttttgtatttttgtagagacagggtttcaccatgttggccaggctggtctcaaactcctgacctcaaggtgatccacctgtcttggccccccaaagtgctgggattacaggcgtgagccaccgcgcctgaccctatatattttaaatgcttaacgacagtggtcaggtaacagcagtggtgaggtaagccgccagcaggtggcaggcaagaccgctgcagcaccgtggtctttacagttgccctgggcacttacctgggaacgggtgtggttggcggggcccttaggcaatgtgcctgtcctgagatcttacacagcctgtctccaggctgggctctgagctgcgctctgtgtgggtggaagggacctagaattgctgatgggagatgaagacgctccttgtccgggagaattgctcagcatctgcacagaaccatggcctcggctgaaatgctgcagacacatgcaaaagcggggacgtgggacaaatgccagggtcctgcgcccagactaacacctgctgcgtttcccatggagtgcagtgggcttgtgcttagacccagcgggggctccgtgtgcctctctccctccctccccagagggagccactgtccgaagctggagctttcttttctggccatgtttttatgcatttactacaaatggatgcacctgacgcggtacctagtggtcgtgagtttaaacacaaaaatgggagaatgggaattgtcacaccgtatgtctgagtttgcacgtgctgttttactcatggtgttttcaagacgtatctgtgttgctccacatccgttgggttcattcacttcaaccactgcctgtgctgtatgtagtgtgtgggcaccatttgtccacctgtttcaccatcagtggtgtcgcacctgtttcctggagtatgtgtgggtcagttcctctgagatgtgtacccaaggcctgctttgagatgtgagaaccgtcagtcgggcttggcgggggccgcgcctccatgctcccaggcagcacacattcctcagtctcgactctcgcccgttgtgagcctgcaaggatgccacactgacgtcacaaacagtgcacgtgcttggaagcagttctggtttcttttctgtgagctgtgttgtcatggtctttgcccatttttatcttgggctgcttgtcctttccttagggatgtgtagggctcttcaggcccttgggaaaagctgtcctggtgacagaggcccggcaggtctctcttccggctgtgaaacaagcgctgcggaatgcagtttccttgcttatcgtgcccgtgggctctgagggatgtcatggccgagtgtgtgtatgagtgtgtatgtgtgtatatgaatgtgtgtgggtgtgaaaatgtgtatgtgtgtatatgtgtgcgagtgtgcgtgtgtgcgcgcgctgtacctctccctgcgtggtgaagccatcagattgtgcgctcactgatccctgttgttgagtctgataagggtgagctcagaagccatcagatcgtggcctcactggtcccagttgtggagtccgatgagggtgagctcagatgctctgtggtcactccctgtgccgtgcttcggggacgctgagatgctgcaccagccaggcagggcggggtgggccccacttccatcgagctcctgcggatgatgagcaccacccaggagccacctggggggcagggcaggggctgaatcccactgggggtgactgtctctcacatgacaggagtccagggcatgcatggaggctcctccgtgtcatctagcgccagctccttctgtcactcctctgtggcctggagcggcctgctgtctcccggtcacgagccagcccgtgggcatcagcaccgcaagagcagggtccgtccatcttttgaggcacccccacccccgccacacagtgccttctgtttcctctcattgggcagaatcgtgtcatgtggccgcccagttgcaagggagcccgggaagggtgcgtgggccctgtccagcagacctggctgcttgtgataatgccatcagtggccctgttgtcactttggccttgcttacgttgccgattaggttaggaaatggtcttgattctgggatatgtgagcctgaagttaccaatgtaaagcagcacctaatacatgttttggccaaatgggcatttgttaaaaaaaacaacaaggtttggtcagagctcaatgtcaccatctttggacaaatttatgtgatataagaatacatcagagattttattgaaaaatatattgcaatttcatcattacatactttaatggcaaaatatgctattaacagtgcaaggccaatatgctccctgttgcagctgcccgtgaggtggccttccccagggacgctgacatgtctgccacctccagcatggccgtgcagaagcaagacgtccatgggcagctccaatggtgacgttgcctgcacgccacctagctgagcaggaacagttgtattggaggcgtgtgggtgacgagagagaggttaacggctggtgtttgtgtgaaactggagacaaatgaggactgggcattgtgtctacgtgggcgtgtgcaacaactgcgtgcatgacagctgctgtggatcacatgggctcatgagtgtgcctggtgtccacagatgtgcacagtggtcataagtgtgcagtgttggtgtgtgtgcacagtggctgtgggtgtgcgtagtagccataggtgtgcacagcggccatgggtgtgcaaagtagtgggtgtgcacggtgctgggcgtgcacagtggccgtgggtgtgcactgtggtaggcgtgcacagtgcctagatgtgcacgctgttggtgtgcatggtgatgggcatgcacagtgggtgtgcacagtggccgagggtgtgcatggtggtggtgtgcagtgtctgggtgtgcactgtggtaggtgtgaacagtgggtgtgcatggtggtggccgtgcacagtgggtgtgcatatcggtgtctgtgggtgtgcacagtgtcttgggtgagcatagtggtgggcacgctgcatagggtgggtgtgcgcagtggtggtgggtgtgcacggtggtgggcgtgcacggtggtgggcatgcacagtgggtgtgcatagtgactgtgggcgtgcacagtgtgggtgtacactgtggtaggtgtgcacagtggatgtgcacagtggccgtgggtgtgcacagtgtctgtgggtgtgcacggtggtgggtttgcacagtgactttgggcatgcactgtcttgttctgctgcagtgctggtggcgtagtgtccacaggctggctgagcactggtggcagctgcggtgagtgttgcttcttgcctgatgggacttctttggtgttgctgctcctcccttggttggggttttctagagccctgagcgccctcacactgaggtcagcgctgttatctgtgagaagaagctgtgtcaggctctggtgacacacacttcaccctgccaagccccccagtaactgctgtggaccaggcagcaagaagatttgccctgagcggcgcaaggggcaggacccatggctggggctccacactcagggtgtctggctccttcattaggtgatggcttcgccgattcactctcacttgctctccttttcctgtttcttgggcctctcctcgcctggccacctgaccaaaagattgctttatgtgatgtgattcatgtaacaagtgcttctgccttaaacccagagtctgtgccttggctcacgcctgtgatcctaacatttcaagaggcccaggctagaggatggcttgagcccaggaattcgaggctgcagtgagctatgatcacgccactgcactccagcctgggtgacagagcaagaccctgtctctaaatttaaaaaaaaaaaaagaaagaaatacataaaataaaaactaaaataaatccagcaactcagaacccctgggaagtgtaggctgaggcaccccagtcagaggcggaggtggctgaggcaccccagtcagaggcggaggtggctgcattgggtgctatttctaaaacggaagggagactctggcaaacaatcttaggtacagagtcaggagaggacccccatgctcttcgcgacctcacagatgaccttgctgcccagcacaggggctgcagagacctggcctgacaggccccgcccactgggccacagcatcctcctttgtcttcttctgtgacttctttggaacaattgcactaggcctacagagacccttactggtgcatatttctcttctgtttggatctggtgactagaaaataccgacgggccaaaagaataattcatcgggaatcccgccacctggtggagattttcgcataaccacctggtgcctgcgccgcgtgctgaagcctgccttcccgctcagctcacccctgcagggccggcagtgcctgtgactcggaagtgagatgtaagagatgaggaaatttcctcctgagcctgtgacagcgccgacttccttcctgtggcggtcgtcttttagttgctgccgtgacgactcagtcgtcctggactcaactgtggccatgatagcggattccctagacaggcatcgctgttgacgctttggtatggaatcggaacagggcgtggcggagctggaccattagccacgtcttttgctgtttcagactcgggatctgaggatctgaggatctgaggtcacaggtactcccctttcaagcagcgaccagcagggaaggcataccccagctctgggcagaccgtctgcccagcctcacggcccaggtctgctggcaaagggctttcctctctgtgtctcagtttccccttttgaatgagccacctcataaggtggctgtaaggattcagtgggaccccatatagagtggattctggttcttggggtgtagcaagtgttgctggatacagcagtgccataagggaagcaggtgtgcagctcagcagtggcctggccaggatgtctctgccttatcggggaaggcgtgcgtgggcatgcctacctgggtgttgagggatgggtaggagtttcctggtgtgagcaggcaggatgagtgtgtgtgtgcgtgtaacaacacgacctgtttgggagcatgcttggtacggctgggctgtggggtgggtaggtggggcccaatcttggaagaatgtggctgtggtatacagaagcagccctgagtgttaaacatgggagcgggaactcctctctgcatttgagaaaagtggctctgagtgccacgcaaagcaggctgtgagtgcgggtggctctgaaggcaggagccactgaggagggttttcctgtgcagaactgagggggacttgctgcacgtcaggggacagagagagggacactgggtggaggcagagccgagcaggcaggctaggggcttgagttggcaggacctgccggcagggacttgggatttccgaggggtcgtcccatctcccgctgacagataagcaggttcgttccgcgacttgccaggagtctctgtgaaaggtcgtgaagcgggcttcaggctcaggctcctctgactccagagcccgtgagtgctggcctcgtgggaaggttactgcttctcatcagcggaggtgatttcagttgcagacaacaaaagtcaatgatttgctggtaaccaaagagtgtggaggtcgggccagttacaggagaggccgacccagtggcagggcagcggcgctaaggatccaaccttcccggcgttagcttcatcctaggactagctccccttgtgaccccaagacagtggccagcagttctagtgatgaggaaggtctttgcccccattagaagagtgtccttgtccggaaggactttcctacccaaaggtaagagttgctgtgactacctgaagcaggtcccgtggccatcccagagcgggcggctggaaagggctgcgggctcagcctagatcgtgtgcccctcccttgacagctggacacacctgggctgcagggaaggccctgggaaaccttctaggcagtttccatccagcgccctgagtgctggcgccacctgctgccgggttccggtagtgtgcggtttcttcaggtcatggagaagcccttggggctcccgaggtatgtggctgtaagatacctctcttttcttcttatcaaactaaggacaggagaaacaaatcgacccagaaacattcaaagatttctacaactgctggaaggagacggaagcagaagcccaggaggtcagtctgccgtggctggtgatggaacacctggataaaaacgagtgtgtgtgtaagttgtccagctccgtcaagacaaacctaggcgttggcaagatcgccatgacccagaagcgcctgttcctcctaaccgaaggaaggccaggctacttggagatttccaccttcagaaatatagaggtaaggacagcacaggcagacggcgccagaccccacctgtgtttaggagacagatggctggagtgggccctgagcagtctgccagccatgccaagtaccagctgcagcccttctgcagaccgaatgccttcctgtccctcagtttgctcatctgtaaagtaggaataaggctgataccttctcagtgggtggtggagattgaatagtttgcatatggagcatgcttagaatggtaactgattctctgtcacagctgacttgcatctgggaggcaggaagtaagaatgtgggctgacattctcattagggacagtaggacgccttcgttcatccatgagatgtttactgagaaactgccatgtgccagccacggtgagctacagtagctcacattttctagtcacagtcggacctggttcatataaaacataacaagcttattttataacaattaaaaaatcttcaaacagttttaacattatattctaaaggtagtcattttccctgtcgaggaaatctgaatttcatcctgattcctcttacgccttatagttgttttcccagatttaaggggactgtaagaggcatgtcagatacacaaatgttttatgtgatcacctgctgagtggtcatagaagccagaaaggcagtcaagccacagccgcagcccatagtaaatgctcggccagtagatccccctcttgctgttggccttcagtttatgcttttttccacacctgcttttccagacttccttctagaattccaaagaaatgtaaataaatataaggaaagggagatggaagtaaaaaaaaacaaaaacaaaacaaaaaaaaaaaaacaaaaagagggagagagaagtatttaaggatgtgaaagaatgcgctgccttcggacactgggcgagcccagctgtgtgggtgggtgtaggtgccgcaccgcaggtgaatcctacctgccgtccatgggaacactgcccctcacccggggccctgccttccacatgccagcaggatgcgtgcctgcagcccatctgcctcttcattccagagcccgctctgcctctgtctctggtgaatccacgtgttctctgagtgtgacattcctaacttttcttttctgcctctgcaggaggtcaggagaaccactactacatttctacttcggagaatacccactttaaaaatcagagtggcgtccaagaaagaagtcttcgaagccaacctgaaaaccgagtgtgacctttggcacctgatggtgaaggagatgtgggctgggaagaagctggccgatgaccacaaggtgggagacgcgggtcccctctgccctttgctgtggctgcctcaggggcctctcgccacctgtgggtcctgtggcagtcctcagctgtgagtgctcgggctcgggtctgagtgtcttaagcagagtaagtttgtcggacaccatcttgacagaagcattgaagatgtggtctgtgtgacccagcgagaggcctcacggtgctacggaagagcatgatgagaaaacgcagggcggtctgggcaggtgtgggtgccccactgcccgctccagactggcgacatcccagagagtggggcctcccgggggcggacggtgctggtgctgtccacacccgcaggccggagttgggtgttttgggcttccctgctctgagcgactcttcacagtcacaggatttggaattcggcaggggcagtactgctttccttccacagggttgagatgatttttctagggattgttgtaccttaatttactttgggccaaattgatagctttgatgatatcaaatgacaattgcatagtaatgaagggaaccatgggccggtggtgtgtagaggaggcatccacgctgctcaagggtggcacaagacaggaagacgccttagaaaatgggcaaagaccatgaacgcggaactcacagaaagggaacagttcaccaggttatgaagaggtgtgtagccccactaatcctcagagaaatgccggggacgatggcacccactacagtggcagtgctaggaggaacagatggggccacagcgggagggttgctgttattacaggaagttcccggtcacagggcagagggggactgggtcctttctaagattccagtgccctgtggcttttagactagccatctgatgctatacccactggtttacatagcataaaccagcatagtcaaaccaaagcccgtgggccagtggactgtctttgtaagtaaagttttattggaacacagtcctgcctgtttgtttatgaaatgtccctcggtgctcccatgccgcagtggcaggcagtgggtgatctcagctgagactggccacaaagcttgaaatgcctcctgcctagccccttctagaaaacactggctgagccctggtataaacaatcaatatttgtcttaagtaagagaagaaatatatgacataaaatccaaattcatccgtgatctaaactcttcatgtcactttggaaaaaggcattttggaaggattgtcctgtgtgttgcaacaaggtctccggtgaactgatcttagtgattcttgctgttttgaaacgcacgtgtttctgttgtaggaccctcactacgtccagcaggcgctgaccaacgtcttgctgatggacgccgtcgtgggcacactgcagtcaccaggcgccatctacgctgcctccaagttatcctactttgataagatgagtaacgaaagtaagataagcccgttcttagcgtggatcattgtcctgattacacgccttaagtgattttatctggtcgatgtctgttttatcaagtagaaccgagcccagctcccccagttttttcttttatatttgtaatttactctcgagtcgcacaccttatccggcatctttccttccttcactgcacagtgcaccttggagccccttgcgcatccaattgaggcacctcgtcgttttaatgtctggatagcattgcaatgtacactgcaagcatttgtggtgattcgtaattacaaacaacagcctttcctctggctggctgaagcagactagaaacctgtgggaggttgtggagcggctcctggaatctctgactggtggggagcgggtgtctgggacttgcagttaggaacacacctgctgagaagctgggaacgtctacacagctggcctgttgactgacgggcttcaccgctgcatgagtgaggagaggccctgcacgtcaggatccgcttttttcttgattgggtcagcttccccagacaggaatcctctgactgtcctgtagatttgcatctggctctcgcattctggaagccatagaggctggtgctggactcccatttttttcttgtgaaaggtgatcttcaagcctagggttttctggtcttcttgtgactgagtgatagacaccgtttgggtgaaggacgtttggtctgtcccttcatcagtgagtgagcactggcgtggcctctgtgttgtggctgctgtgagcattcatgtgtaagctctggtgtgcacatctgttttcatttcccttgggcgtagatctaggggactctggctttttaaaaagtcgcagaattaggaacaaacctcacttacgtgtttatttccttgggcacagtttgctctctttgtggcatctgtcaccaactgcaggacctctgccactttctgggtacagaatccctctcccacgtgacccagagggaccttgagctgcagcagcagccgggctcaggtgcctgtgttcctgcaaggccagctgagtggcttgaaggagcttttgtctgacagtcctggaaccagacattgattgctcttttctttttccttgggagcaaaatcaaacaaaccccctacttcagctgttgatctcattccaaactcatgcctaatctctgtcgggcgtttacaggaaagccttctaacgcctctgttatcagcgcatgacggcagacgaggagccgccatgctggtgtcacttggtgtggtgcgctggctcccgctccctcgttacaaatccggaaacattttcccatgtgtaaagctcaggacacatgagcctgagcttaatttagtagcttatggccaactcatgatggaaggtctcagactgtacggaattaaataatacccgaagatgtcatagtccgaggcaggagctgaagaggcgttggccgcggccagttggctttcaccgcagcccggtgtagcccgccagcctcgtgcggagtcctggtcgaccccttgctgacagtgtgatcttcatttgatcacggatgtcgacgtgtgtcggtttcttcatctttcttttttcaaaatggggataacgggaccaatctcatcaggttgctatgacagtaacaaaatgatggaagagaagcacttaaggggcaggccctggacggcagggactgagggagtcctggacgcaggaggtcgaggcgcccgcaggggctggcaggagggaccgcagaacaggctggtcccaggggcctccgggcagcaatgaggagccgtgtcagagcaggctgtgcccgggggcctccaggcaggaggccgctttaggttttgcctggaaacatgggttggattggatagcaagaggagcattaggatatcctgaggagcagtggttttgaacggggggcgatgttgcaccccctcactgcggagaggcattttgacagcacctggagatatctgtggttgtgtgtgaggtgctactggcatctcatgatgctccacatcccatggcacacaggatgctgggcattcgcccacagccaggattatccagcccaacacgcccctggttctaggctgggaaaccgcgctcatgggttaggtctctgggtttcatcttgggagggcttcgttattgaggagaattttatatctccgctttgctgggcactgtgtcatgtttgggtgtagctagagatcacaagggatggctcaggagcagagaagaaggctgtgtttaaacaaaggcagctcgaggcataggggcatggaggtgtggtgtggacacaggtgggggatgcgcctggccactcactcgcacaccaggtgacaaccaggaaaggaggccgagggtgcatggctttctttcagtgccccgggtccaagagaccttcgtcttcacaaattaggaagttttacctgcaagctgatattctgcagaaatcagagtgcgtgaggccgttgcatcgcgtctgtttccttgaggctgcaacagtaacactccaagtgtcttgtctttcagtgcccatgacgcttccggagacaaccctggaaacactgaagcataaaatcaacccctcggcgggggaggcgttcccacaagcggtggacgtgctgctctacactccaggtaaggcccctctgcccgcgcctcgctgccagttttcagccaatctgatgcgcttaggtttgggttcagggtcagccctgaagtgaaaggggagccagtgtcacgggataagtggggacaaggtgcctgttgctttctgaggtgaagtgctgagtgacaggtgtgcagctggcacgaccgctccacggactcagcctcacggtgactggagccagagagcccacgggagatggaattggggccagcacttgagctcccgccccagggctgccgtccctcaccttctagagcagtcgacggtcacgctagctctttctttttttgagacggagtcttgctctgtcacccaggctggagtgcagtggtgaatcttggctcactgcatcctccaactcctggattcaagtgattctcctgcctcagcctcccgagtagctgggaccccaggcacccgccaccatgtctggctaacacactggcactttctaaagcactcttgctcacatcgtttccgcagaagctcttaatgggatcctcttgtcatggtgataaggtgatggcgcctcagatatttgttgtcataggaactggaatgacaaggagtctgtgtggccctgagcggccctgagtgcctgccagtccctcttctccgctgggtgcggctgcacctgcctcctgtgcttggctttcctgggaccctgcacgccgcatcagggtggtggcaggagaaggaaatgggcgcggccaagagtcttggtataaaaaaagatggctgtcatgtcgcacgttgaaactgtggaaaatacttttatttaattttggcttatggacagtgcagcagggaagcttatgctgagggtttacagtgtggaaaacaaaggaatacagttctcggcagaaaagatttgtattttttgtgtattttttatttttttgagtcagggtcttgctctgttgcccaggctggagtgtagttggtgcaatcatggctcattgcagcctcaacctcctggattcaagcgatcctcttgcctcagcctcctgggtagctgggaccatcggcttgtaccaccaaatccaggcacgtgccaccgaaaccaggtgattttaaaaattttgtgtagagacggggtttcgccatgttgcctaggctgatctcgaactcctgggctcaagcgatacctctccaccttggcctcccgaagcgctgggattacaggtgtgagccactgcgccagcccagaagggatttttaaaattgtcactttgtttgttgcatctgcgtctgcaggtgtcagccgtaggtgtcagggatgcagatgtaggtgtcaccccctctcacaggccatgtccgcggcttcacagagcacctggccattcacacacggagctcatgcttcaggtgggcagagaagctgtgtgtgaagcgatttccccataagagagtttttctctcttcatggcaggccaagaaacccaggaacgcgatagaccctggctgagtgagcaggcagcgtcatcagggccgccccgcgtgagccctacctgatgtgtctaagccaggctctgtgctgacttcgccagagatgactccacagaccaagatactttgaccgtggcatttgaatacatggtatttttaggtcccggttggtttccctgaaatgaaactcactctgagcttcctgttgtgacgggcgaggagttcaggcggcttcccctccaggagcatctcgaaggcctgcagagagcgtgcaaagcagccgtggggaatggggaaaccgccttttcctgtggctgccgattctggaaggggtggccgagaagctggtagccgagcagggcttttgcaagccttgtgagattgcagggacaagaggtggggtcaggccccatcaagaagggggagtcttgttattcccattagcttggggctgggtctccgacaggttcctaggagttaggagaaccagccctgaggccaggccacaggtcagctcaggctctgcccatggggagcgtgcctctcagagacggcagtgtctcacccatgggagcaacagaccactggaatcgcaccccagaaagaccgggaggcctgcccttctggactcaggacggaggcagcactgcagggcggggggtcgcttgaatatcctcaggggaaaggtgaaacctcgccccttcacactgccctgcggtcaggcccaagggggccgaaacctcaacgcggtggtaaaaggcaaatgtgaacaatgaaagcaagcagacttctaggtgatagggtagaagaatattttcatgactttatggtaaagaaaaaaatgcataaattatatataaaataccataaaggaaaagaatgttgaatttgactatattaaaagcaatgactttattatttttattttttctgagacagggtctgactctgtcacccaggtgcagtggcgcgatcacacctcactgcaacctctgcctcctgggctctagcgatcctccgccctcggcctcctgattagctggactgcaggtgcacaccactatgcccagccaatttttgtattttttttttttttttttgtagagatggagttttgccgtattgctcaggctggtcttgaactcctgagcttgagcagtctgccggttttggactccaaagcgctgggttagaggcgtgagccaccacaactggccaaaagcaatgattttaaaaagaagacactttttttttcctcctttcaaatgagctggtttaattcacggtgacacaaaattgagggtagaagaccaaagagcgccctctggcaggctcaggtgggaatgacgggtgagaagccactgaagacgtccggtgacactgtcagttttttgttttgtttttttttttttttaatttaaaaaaaaaaagaaaagtttatgcttgaaagtgcaacaggctccagggcaacgctcactctagctgaagatggcaaaagctgtcctggcgggggtgcaggtgttgaaacaggagtggagtccaggccgccaccgcccaggcagagggagcagcgtgctttccgccaggggtcttagttccagctgtggctgggcctccctgcggcctgtgctttcggccccttgaggttctggtctgttttgctttctgctggaagcctcatcatctctgtccctctcctgggcctgcttcttgggctgtctcagaggcttcttgccatcttcatggccggacacggcgcctacagcctcttccccagaccctgccacaggaaatggacagaagacacttttgagagggtgaaaatgtaagctgcagactgggaaggatctttaaaatgggtgctgctaaaatcattgcttttaatgtagtcagattcaccagtcttttgctttatggtatttttatatgtcatacgtaatttatgaatacagcaccatggagtcagttaggggctcatatccagaacaccggaacagctggccgggcgtgcctgtggtcccagtgaggtgggagggtggccagagccctggactcggagcctgtggtttgctgtgatcgcacctgtgaacactgctgcactccagcccgggcaacatggcaagacctcgtctattaaaaagtaaaaaaaaataaaaataaaaaaaaataacagccacaaactagggagaacgaaaaacagacacttcccacaagagggcatggggatggccagttcaagccatcaggctcattagcaattagagaaatgcaattaaaccacaatttaaaagccaaaagctccacacccttagaatggccgaaattaaaaagatggacggacgccagcaagtgttgggaaagacgcggagcccgctgcacatgagggtgtggggggcaccatggcccctgccgccgtctctccagctgccctccctccctgcctccctccctctgtgtccacctgctcctcttccagttccctctgcctggctgtttcctctagtgaatgctcactcagctggcaggtcctggcttagcaaagctcacaggcattcggctctgcatctgcctgcggctctgaccctgtctttgtggccctctcaccagccagctgccccccttgactctgagctcccagagggcagggaagcctctgcctgggcacgtctttgtacgtacagcacctaacatgggcctggcgcttaggagggcccaggaggcacctgagtaagggcaccagtcacctgctgctacagcagaagtgtttcctcctaacagttttgtgctgctctcctctttagggcatcttgacccagccgaaaaagttgaagatgctcaccccaagttatggtgtgctctgagcgaaggcaaggtgaccgtgttcaatgcttcttcatggaccatccaccagcactcctttaaagtgggcactgcaaaagtggtgagtacacgaagcgtcaggaaagaagcctctgaattcacgtgatttctgaaacccaagtgtgttcatccatattcgacagtaggatacaagctattccacagcctcactcggtttctgtaaacagggggtcttaactttcacctggagttttcaaattaaatgtaagcttgttccaaacttctacttacacgtccttattgaaggagaagataatggctttgactttctcatctaaaaacagatttcaggcccccatctaaaaatagattgcaggggctcacacctctaatctcagcactttgggaggctgaggtgggtggattgccttgagcccaggagtttgagaccagcctgggcaacagagtgagaccccatctctacaaaaactacaaaaattagccgggcatggtggagcgtgcctgtagtcccagttacttgggaagctgaggtggtaggatcgctgagcctgggaggtcgaggctgcagtgagccaagatcgcgccactgcactccagcctgggtgacagagccataccctgtctcaaacagacaaataataataataataaaataataaaaatcgacgtcagttctgtgaagtggagccattgtggtctctgcctgcttattacaggcttcacacactttgggaacaatttccttcttttttttcttttttgagacagggtcttgctctgttgcccaggctggagtgcagtggttcagtcatggctcactgcagcctcgaccttctgggctcaagggatccacctcggtctcctgagtaactgggactacaggtgcatgctaccatgcctggctaattttgtattttttgtagagatgaggttttgccacgctgcccaggctgggaacgatgtcttccatcctgtactgcagcactaaggttcccagggaccagggccttaaaatgaacctgcagtgtttcctgggaaccctggtgtttcctggtggcacagtggttactgggtctcttttggagcaaaagaggagacagctgcctctgcagtgacttcagtgttatccacctgtccccacgtgccaggtggcagagaccagggcccagcaaaactcagtgtccactcgtcacacattattcctctcacttagagcaagcttgtccaacctgtggcctgcaggctgtacgtggcccaggacggctttgaatgaggcccaacacaaatttgtaaactttcttaaaacatatgttgagttttttttgcaatctttttccttctagctcatcagcgatcgttaatgttagtgtattttatgtgtggcccaagacaattcttcttccactgtggctcagggaagccacaagagtgcacacccctgatttaaagcaagtttgaattgtttctgataattttaaaacaagtgcaactgttaatacatttttagtagtgtgtccttggcagtgccatggtgtgtcgcttcttccatgaccatggtatcttgagtgtggaagctgggattcctgccctgctcatccctccaggcccccagcggcccctcctgcctgcagaccatcatttcttggggattttccctgtttgcccgtcagcgctgtgagctgcccctccctgcggatctgtgtgcgcttccctgtcgcccgagaggccgctgagtagctccccgtgctctgagaccccacactcccccgcaccgtggcctgcgcgccctttgtccatgtttctcctgttcttgctcatggatttgcagatgacgttcacatttaaattgcattttatagttttcaaaatattttcgcatctacactctcctcctatctggtcaccctccaagcagccaccccatcatgggatctgctgagaaatcctcatgccttactccttgagcatgataggatttttttttttttacatgtttaatgtgaaaagaacactccagtggagtatatacctaagtatatattaggcattggctggtaccatttttttttttttgacagggtccctctcccattgcccgtggctggagtgtagtggcacaatcgctgcttactgcagcctggacctcccgagtagctggggctatataggtgcgcaccaccacacccggctaatttttgtattttgagtagagatggggtttcaccgtgctgctcaggctggtctcaaactcctgggctcaagcagtcctcccgcctcggccccgccaaagtgctgggattacaggtgtgagccactgcgcccggccatggtatcagttttgatggctgtgttcccttgtctaaaaataatgtgggaaaatccgtggcacagtatgtgcttgcaaaactgctataaaacaaatactgtgaactcaaatacataccaccaagagggtgggaccactcttgagatacctgaatagcaaactttacatgttagaaggtaataagagcctgctaaatcatttccccccatattcaaatcatgagcctcagatgataaagtaataggatccatgatacagtaaaaatattgacaaaagtctagtaatgctttaaaccaaacaacaaaaaaaggaaaaattagggaaattatttttctaaatttaatttttttcagttcgttcttagttataagcatttcaaggctgggcgcagtggctcacgcctgtaatcccagcactttggggggccgaagcaggaggattgcttgagtctaggagttcgagaccagcctgggcaacgtggggaaaccctatctctactaaaactgccaaacatcagccaggcgtggtggcatcagccaggcgtggtggcatcagccaggcgtggtggcccatggctgtagtcccggctactcgggggtctgaagcgggagaatcgcttgagccgggaggctgaggctgcagtgagccatgatcatgccactgcactccagcctgggtggcagagtgagactctgtctcaaaataaacaaacaaacaaaaataaaaattctgatttcaaagagtctaaaagcaatcattatgttgactttgcttagcttagacagaaaccctgagcgcactctctagacactgggagcactgccagttctgcttgttcacatacagtcggtctcatcatttggagattccgtatttgcaaattcgaccacctgctaatatttacttgtaactcccaaaacagatactcgtggtattttcttggtgatccacagacatccacgtgcacagacgggggaaaaacttgagtcacctgatatggattttctgggccaacaagtgtcctctcctcggcctgattggtgccacagttttcacattttttgcttttcgttggtgattttgccatttaagaaagcctcaagcatggagctccctaagcacaaggaggcggtgacgtgtcttgcagagaaaatgcatgtgtgagatgagcttggttcaggccgcagtgacagtgctggcggccgtgggtttcgtgttaatgaatcaatcatacgtagtcaataaggtgtctgtgaacagagcacgcggagaacaaggttatgcactgatgggtggatgacaacgtcagggccagaggctcccaggaccctgagccggcgtgtcccctaggagcagtggttccatatccgctaattcagcacgtgcagtaaatgtatagaatatgacttcaccagtatcgagactgactgatttctcacgttcccgtggcctcctgttagaactgcatggtgatggccgaccagaaccaggtgtgggttggctcggaagactccgtcatctacatcatcaacgtccacagcatgtcctgcaacaagcagctcacagcccactgctccagtgtcacggatttgattgtgcaggacggacaggaggcacccaggtgcagtaagctctgctggggagaagggactgtttggcttgtgggtgggcagaaggcacagcgggtagggttcccaagtcttgtgcccacaggggccaggcggggcgtacagagtgaagtggatctagaacgaggaaagctgggtggtgtcctcggtctgcttctgctcacgggtgcggagaacccatgacaccagtgtgggccaagcgtggtgatgaaggcaccacacccggccttcctgctgagcttgctgtgggcactgtggcatggggcagccccgagagggcacagcctcccagaggtgcaccagccatggtgtcagaagcctggactcgcctgataatcgcctgagtgctcagtgttggccttgggctgcctgttcgctgctgtttcccacagtgggagcagcactggacacggggcatccagggagacgggaggaggaggtggggtctccttgagcagaggctcatggtggggaaagtgcacaaggctgcccacttggtccaggcagccccagccctgggtgaggggccacactccccactcctttttcccctgacttagtgtcgggggcgcctgtgtcaggccctgttggggtgggtagggaggtgctagtctggaagcaaagctggctcaggaggttcaggggtggcgcagggtgcaggctcgagcccagccccgcccacagccgcctgcacctgcagccagcccatgtcacccgagagctctgaggatcgtgctggctccctggtcccttgtgtgaacggggaccgctgacgaggttccatttcagttcatggtcatgtcatggctctatgacaacacctcattgagcctgcggcccgcggtggtgggagaggtgggcgtcccgagaaacccgccttttcctgccgagtcagttacatttgagccaagcctggctgtggctgcattcatagcatgtttgcatgttattatcatgtttgcaggttacgtttgcaggttattatgtttgcatgttattatcatgtttgcaggttatccgtgttgagcacattttctctcatggcgacttggttctctcttgggttaaaatgtgcacagtgttttcaggggcccaagttaaaggtgtgtgtgtgtgttttgtgcccccagcaacgtgtactcgtgcagcatggacggcatggtgctggtgtggaatgtgagcacactgcaggtgaccagccgcttccagctgccgcgaggtggcctgacgtccatcagactgcacggcggccgcctgtggtgctgtaagtccggcccctgccatcagagcgggcaccctacctccctgctctgggaaaaggatgctgaacgagagcagaaagcctctttcctttgcttcacgcctttccagtctttattttaaactcgggttccctttctgtggtcgcagcaacctttactccacctgcactgctgctcctgggggctccccaggcctccctctgcctttctacccagcggctgacgggatgcctgtcttgcctggacgcaccactgctctcctgtccctcaccttggcttttgctgtgccctgctctggggttgaagctggcccatgtgtcccccggagtcatggctgctcctcctgggaggcctctgtgtgcgtcacgtctccacacctgggggcagctggcgagcccgtgctctgttcccctcggctgcttggcacagagctgcagcctgggactctccgtggacccagactggggattttgccaggggggcgatgggaggagcaggtgctttgcctggcggctgtgtctgcatttctggacgccccagagcacagaagttgccggcactttgaggtcttcctcggcatgtgccagattacatgagtgacggctgggaatatgttttcttttttgtaatggaggcgtgtttcacatatagtaaagctcaccaaaaagtgctcagtttgttgtgttttgacaaacatctaaactacataaccatgaaacaaatcaagacacgcagcgtttccgtcacagctgaaagcgtctgtgcccctttccaggccgtgccgccattcaggggatacaagtgctcttagttctgtcatctgaatttggtttttacagaactttctacaaatggactctacagtaggccttcttctgtatctggctttattcagacagcaggatgtttatagtattcatcgctgacgttctgagtatcaatatcaatagctcgttccttcttgcagggtaatagtccattgtgtgcatatggaacatgctcatccttcccctgccccaagtgggcactgggttcactctgcttaactgtttgaaaaaccgtcagactgttttctgaagtggcggcagcagcttccacgccacccgcagtctcaggcttcatttcttcacatcctcacccaaactggttctcacctgtttttactgacaccgtccccgcgggagtgaagtggcgtcttgtggtttggatctgtggctccctcatggctgatggtgctgagcactctgtcgtgtgcccggtgcccgctgacgcctccctgggagcagcgcctgtgcaggcccctgcccactgttccgctcactttcagggccggtagcgacgtggttgggtgcaagccaacggttgtccttcttcccctcatctgttatttgttctgttcttcctttcttgccctcttttgtattgaatatttttatgttcaatttaatcttctttactgtttttaagcattatatttttgttttatttttcagtggttgctctaagaattgcaatatgcaaccttaaccgatcaccctcctccttaactaactatgatactgcttcatggatagggtaagaagcttacaacagtatcaagtgtggtactcccaataatacattctttaagatttttgcttaagcagtcaatgatctttcaagaaagttaagaaaaattaagaaactgcccatatatttacgttttctggtgagcctcatttcttcttaaagacccagggttctagcttgcattttttcccagtagacctcacctgtgcattcctcaggcgccaggtggcacgtggtgatcccccccatcaccacgctggaaagagcagtgaggccggctctggtgctggcgtcttatgttgccaatgacactgcctggccccatcctagctccttccttccacaggcacaggtaacagcatcatggtcatgaaaatgaatggatccctccatcaagaattgaagattgaggagaacttcaaagacaccagtacctccttcctggccttccagctccttcctgaggtatcccagcaggggctgtgggcccagcatgtgcgtggcccggggcccatagcccacaccgtgccctgcgtttcaggaggagcagctgtgggcggcctgtgcaggacgcagcgaggtttacatctggagcctgaaggacctggcccagcccccgcagagggtgcccctcgaggactgctctgagatcaactgcatgatccgggtgaagaagcaggtagggtggagggcccgccatccccagcatccccggcaggtctcgcttgccctggccgcatccccatgctcccgagagccagccgcacgccctcgtgccctcctgccttcgcctctcagggttcccctcctaacaggcacgtgcagggttggtgccaacgggcccacaggtcaccatgtgctggtttcatggtgtggtccaagcactccacagcgcattcccccaaactggatggcttcaaatgacagaacttaattttctcacagttctcgacgctggaggtccaaaaccaaggtgtcggcagagccgcttccctcgggggctcggggggagcgtgcactccaggcccttctctcccccacccgctcatgtggccgccgtccttggcgtgccctggctgtggacgtggcactctaacctgtgcctgcaccacatggcactctctctccctgtgtgtgtctcttatggggatgctggtcgtactggattaaccagtgtgaccacatctgaactatctgcagactctacttccaaagaagctcacattctgaggttcagaggatatggatttggggggacactgttcaacccattacagtctgccctctggccccctaaatccacatctgttccacatgcaaaatacaccccctccatcactacatcccccgaagtcccagtccctccagtgtcagttctgagccccaaatctccaagtgaagccaaagccctccgatgtgggtgagccgtgggcgggtcccacctggggcagaaccaacccctcttgcaccgtgaacctgcgcagctagaacaggctgtctcttcccaaaacacaaggctgggccaggcagaggttagacattctcatccgaaaagggagaaattggaaggaaagctggacttccaggccccgagcaagtcggagacacggcgggggtggggcggaattcgtttagtgttttcccccataacttaattggggtataattgatgaataaaaattatatatatctaaggtatacaaggtgatatttcagtatacattgtgaaataatcacaagctaattaccatatctgtcacctcacacaggtggctgttgtttggtgagaacacttaagatgcaccccagcacttttccagcacgcagtgcagtcttcttccccagaggcccctcggccattaggttctaagcccgagaagggtcctgtgcacctgccaggcggccctgaccctcaggcggcagaggccctgtccaggaaggacatagatttggaggcacacgcgtcaattctgggtagccgggcaaagccctggtgctcttgggaggggcttctttccctgctgacccctcccgtttctccctggcaggtctgggtgggcagccgagggctggggcagggaacacccaaggggaaaatctacgtgattgacgccgagaggaagaccgtggagaaggagctggtggcgcacatggacaccgtgaggacgctgtgctcggctgaggacagatacgtgctgagtgggtcgggcagggaggaggggaaagtcgccatttggaaaggcgaataaacgtggctgagtctgccaagtggaactgtgccctatgtgtggggactggctgccccctagagcctgccaggagcagaagcctggaggggtggcagggcagagcagcccaggctcagcatggagcccacttaccgtgtggccagccgcgagacccatggccacgcaccttctctcaggccttcgggccccctggttaaactgcaccaagggtgtttcctgttggggtgtgtctcaggcaggcagctgcgtcttgttggtgataacctctgctgggaggttactttgttgcctagaaagttctggaatccacaaccaggggctggcactggagccagcagcttggccgagtcacaggtgacccgtggccctcacgtctctggttttacctttccttacttcattcattcactcacccagtccttacgaatcaccgaggaacactgggctgagcacatgacagggagcctggagccccggggcctccagcgaggcctgagaagggtggttcgggtaaccactgtgggctctctcccatcacagaaggtggacagggcctacccaggtggaggggaccaccctgcgatcaggtgtttgcgacaggggttgggccagctgaggcaagctgtcttttttcccttttctttttaatagatgcaacatttttataataatcctagagaccttttttctaccaaagatcacagaccagaaaaagttccatctaaaatatcatgcccaggaaagcacatgggatcaaaagtaaaatagcatcatgtgtgatctcgtcttccagcgtgccgctcagttccccgaatccgtgtgcacacgtgtgatctcgtcttcagtgtgccgctcagttccctgaatccgtgtgcacactgcgtatgtgtacgcgcagcatgctatactgaactcaacaagatcttggctgtacataaatatttgtaaaagagaccctttgcacctttttactgtaatgttgagacttcattacttaaatgttctacggaaggttctggtgtggttgttggagccggagggagcgtgtcagcacgtgctgagggcatggggcctgccccctgggcacccatccacaagctgggccacggagctccagcttctcaggacaaagccccggggctggcgcatcctgagggtctctgggggtgtttgccaggctcctgggatgggccgctttcagaagccctgcagtgcctccagatggaaaggcgggcccggcctccggttgggtctgcattttggagagtccacaccacggaccaggttttcccccaaggcttggctttgtgtagctactaacttcttggggcattctgagagtgtgggcagagagaattatgtggcctcatcctcccccaaggctgtgcttgcagcccgggcaccttcccactttctagctctggagaggttggattttgcttttgtaaacacatgaatccttatgataaaagtctgtcagtcaaaaatacatttataaattatttaatgccagtcctcatgtaacctcaggtatcttcagcttgtggagaataaatctggtttaataaacactgatgtccggctccttacttcatccaacagtgacggggggaaggtcttgaaaatgacccgggaccattctgaacgtgctccttcctcactctaggcaccggtcacgttaccttaatgcagactcttcatgtcttttctccatggtgataatttcaagatcttacttgacagtgattgattgattgcgttttaggaaatggtcactcatataaaagagaaaacaggtgaacagaggtgctaaccagggagtaaatgtgctgggcaggcctgggttccatgtttattctgtgttatgcaaacagaatcctggccagtggagtttattgaaatggaaagggcactttgatgccttcgattttttcccctgtgctttggagagattccattaggaatgatttgtcatggaaaggccccaaatgagctggaattcattcaacagactgtgatgccatccctgcctcggctttagaaacctgaattaaattggtgcaaaaaagtatttctcttgaaccagaaaccggtatattttaagagaatttcagttctcctgcagtatttcaaacaacagaaaagcaagcttgctttagggagctggcactgttcacaacgccaaccaaaagcttacccccaagtccccatcactgatgcagaggttgtgaagacaatcgcctggtaacatttctatgatttgttcttggaagatgtgtctacctcagctgttttcaaaggacagcccttagcactggatgtgactgtaacatctgaattaacagtgcatgaattttgtctgctgcttgaggattccttgcacagatgaaggggtgctttctccgcatgcctgaggagggcatggttggagagtgtggcagggttgcctcactgtctctgctgcccgcagctgtttgcatgtcttggagcaatactgtgccatcccccagaaggtgaggcagaggctcacagacacagagctggtttctgtcacccgcgttgctgctgctgagctgcagtgtgagccgaggcgtgcacaggactcgggggagctctgcagttacctgccctggaatcttggcggattctgagagacacagcctggggtcacgggcacggcagacgcactggggccggacgggagcctgatccaggcctagctgcacatctggccacaagccctgaaccccccgtaaaacgggggtggctccttcttgcagggcccacgtggagaccgacaggggcacactgaacacccagtctgttgctgggctcccaggaacacctcaaagaatgctccatcctggcctgtgtgctgggcccgtgagaacattaaggaaggagaaatgagaatgtgatggctcccgttgcgggttgaatggcgccctcaaaaacgtatgtccatgtcctaaccgccgggacctgtgaatctgacctatttagataaagggtctttgtagatgtcattaaggatctgaagatgagcccctcctggattctgggtgggccctaaa

SEQ ID NO: 149 - DNA, 7625 bp, Homo sapiens
  source 1..7625: mol_type = genomic DNA
tctcgggggttttgttcggccaggaggtgggctgaggggcaagtgtgtggaacatgcaggaacaggctgtgcagtggccctcagtagtggggggctggggacttctgggagactcctttgctcccattcgccatccatcccctttccctgatcagtgggccctggctctggacactgagtggagcagacagtcctcctgcccctataggttccacctcctgactggcactgtggcatcagcatggtccagcccgtgctgtcctgtcaaggaccacctccacagccagtggccccttcctccatctcagagacagagagacgctgggcacaaaagccctgttgaaagttcactttgaagggaagcccatggggtcatggcgacaacacttgttatggaaaggccctggcgcctccagcagctcccttgaggttcaggtgactggagcatccactgggtgccagcagtgctgctgggaggagcagggcacagacaggggccaaagctttctgaggattctccatctatagctggaaaagtcattcctctcactgcctcccctcctcgtagcgagaaccctctgcccacagtggagattgccatccggaacacgggcgatgcggaccagtggtgcccactgctggagactctgacagacgctgagatggagaagaagatccgcgaccaggacaggaacacgaggtacccctggccctgtggtcctgggctctgcccacaggcacctggctttccaggcagaggcagggccattgcctttcccagtctcccatggtctctgagacagagtacctctagtgctgctagaggcaggcaggcttctgggtgataaggccccatccaaacgccagggtatgtttccctgcatggaacaaacataattcctcaggctgagggtctgaccacagcccagatccaggttttggggtccctggagtgatgagcagggcctgagtggcagacaggcgaggctgagagaaggctgggtctgaccctgctgggggcccacatcctgcctctgttcccacccctacacttggctgccctgtagagccttgggaagggcagcgcccaggctgggagctggccccgactcattgccctccccactcctcttccaggcggatgaggcgtcttgccaacacggccccggcctggtaaccagcccatcagcacacggctcccacggagcatctcagaagattgggccgcctctcctccatcttctggcaaggacagaggcgaggggacagcccagcgccatcctgaggatcgggtgggggtggagtgggggcttccaggtggcccttcccggcacacattccatttgttgagccccagtcctgccccccaccccaccctccctacccctccccagtctctggggtcaggaagaaaccttattttaggttgtgttttgtttttgtataggagccccaggcagggctagtaacagtttttaaataaaaggcaacaggtcatgttcaatttcttcaacaggtcatgttcaatttcttcaaagttttaacataaaaataatgagagccaggagtggggccggggcctggggggacgaaggtggtatgtgaacaaggttggcacacaggcctcaccctcctctgcctcagattcccaagtgggcaggtgggggtgaatggggctccgggtagcacctcagctcctctcagctcccctcagcctgttctccttccagacccagagagctgagaagagtagctgtgaggctcagggcaagaggctctctgcctttcaggaacagccctaaccctgctccccttgcttggcctcaggaaggtgccgcgagctctcctgccgtccctgggccgccctggctctgctgtgtccagatggtcaggctactgccagctggggccttgctgctctgaagtcccctgcggagggcccagtcctgtgtgggcactgctgggctgtcgccagcctgggtgcaggagggctgttctagctccagtggcacccatagccaggtcagctggggccctttcccaccccagcaggtgctgtggcctgggccagctcctgccttacaagccagctgtgaggaatatgggaatagccctcccggcctggtgccagctcttggagttgacacggtacagggaggagacacagcccagggtcccttcccagccctgcctccaaggagttcatgtcccctctgttctcatctgtaatagggaggtgtccccattcttcagaatggacacaggatctgggagggcagcaaactggctcgcagctccagccttactgaagagaatgggcacagatccgggcacagatcccagcacagactgctgccaccctcagctgttggcaggtcccatgctgccagggcagggctagggtcagaggctgctgtgctccctggaagtggggtagggccccatgtggggcagaggcagagctctgattagggattggggttcttggtcgctgagatgtgagaggagggctcctttgagcacatgttagcatgggactcttcccagggagtttgcactcagggcctctgccctccatcaaagagtggaactccccagagccccatgcacagcaaggggacagctgggccttactggaaggccttgaacaaaggggaagattcccagcccagctgctcttagacatgaacaggtttcattgctgaggtgtttgttctgtccatgaggtaggaacctcggcaatgaaagggtgaggcagccctgtgtctccacaactggggggatggaaggaaccttggctgcctcaccccacaggtcgggcagggccacctggctgggaggtgccgggaaggctgggccctcactcctgaccgccagctcacaccgccgcaaagccatctccacaaggtctggctacaacacggagggcagactcaacagagaacagtgttgttaccatgaaaatgacaacctgtctttggaggaggccccgtgccactgagcatccagaaataaaccacaacatggacaggcttagaacaacaaggaaagctgccaggtcagaagagaaaaatgagccacaggggtcggataaggctcacacacgtcctcagctaaaaagggcaggaacagaaccttccagaagtccctgcctcacccagtctcagaactctgctaaggtgaaaacttaggctctgaggtcatagaaagggcagaagacctagtcctggccctcttctgcacctgaatccatggggctttggcatcaccagatgaaaaatgaggcatacgcccacctgtcagggtggctgatgagagacaggagaggctagattggcatcagcctgaaggcaccactggcaggaacatctgtaggctggtttggcacaacctaggagacgcctgtcctggccccagcagccgaaatctggtgaacttccccgctgactggcaggtagcagaggcctatggtgggcaggacttgcccaaggccctggtggggccaggatgagaaccctgagcctgtcacctgtgagctcaaaagctctgcctggcaacctgtgagctcaaagctctgccaggcaaccatgggcagtttctttgccctctgtgggcacccctatcctaccacctgcagttgggctgagaggccacactgagtgaggacggggcaggcatagaaggatgtggccaggtgagatggggaagccagtgctgtgggccaagagactgcagctcattctgtttattcaggtgggcccttgcatgggcccagcctttaggatgggttttttctgccccaagtaggggtcatgggtaggatggaagctgccagaagcctcttaggcctggccctgggtgggggtcactgctgcgggggtggcagatggggtcctggctgttcctcagggaggggcaggtaattggggtcttctgcaggggcatccaggagcagctttctgtggggaggggcccgtgttgagcacaggccagcacaggtccccatcggtggggatccttctgagggtggggagagggagggagggctctcaacactcacaggaagccaggggtctgcaggagcctcttgcctccaggctggttggggaagacgtcctccaggaagtagtagatatggcccaccgcaatccctgtgagacagccacggactgtggggtcaccctccacagcccagagtcctagaccagcagagcctgccccaggcccccatccacagcctggtggccctgcaggccccacagcatgagtgccccaaagccttgcacagagtgccagccccgggttggccgtgaaggacaagcttaaaaggcccagaagcaggcaggacccagggaggggagggcctgagaatagtggaggagtgggagccatggggcaggaaccctgaccctcccatcctcactcccatcaggaccgtgcaagcatcagtagatccgtcctgacgatgcaaattatgtgggccggctggcttgaggggctgtaagagcacagcagctgggagggcaggaagatggggatggagccaggtgtgaggagaactccagcaaggatgggagaggggccccagggcataagcagcgtgtcctgaggggagtggccagcctggggcggactagatgtaccgggaggctcacccagcaggtccacgaggatggagttgcccagcagcagcgagaagcccatgagcgcccaaggcaggaacggtgcctggaaagtgagcaggccgaagaagttgaccctcacccgagggctgcggcggctccacacgtacaccagcatggccatgagggcctggcccaggaagaacaggctgcccaggagtcccagcagctgggccagagtcaaggtgctccggtgcaggcctcagcccaagcccagggcccctctgacttcccaagaccctggaattcttcccctcatctcccctatgtgctattccctcatcaagatgagccagtccaataaaggcgacacactccacgggcttcaggtcccacgaaatctgccctgcacacctacagcctcatcccagggcccaaccactgcctgtccctgccccagtttctcccggctactcgcattcagggctcagctagtggccctgacaacccacctggctcttttgtgcatggctttgtattttgcatacagcactgaagatctagccctgacccctgcagctgagcacagagtgggccctcaacacatactaagctggagacagcgactgtgtccctctctggcatggctgtgttggccccaggaccaacacaggctggacgccgaggcgccctagcccgaggttccagagcctgcgggaaggatacggtcataaggacgcccccgaagagaaacatgaagacgaagtcggccgtgcggccgcggaaggagccctcttccagcatgcggcagtagcggaacctacggcgtcggtataggaagtgccaccaggcggggcctcagtttccccgtcccggcctctctcccagcccggccggcctgccctccacccagcccgtgtccgcagggcgcaggatacacgaagagcatgttgaagaagaagctgaatcccaggggcccgaagaagaggaagttggtgacgagcctccagacctacgggggacgggcggtcaggtgcggggtgggtgggtcgggcccacaggtgcgcggcgcggggcggcctcacctggaacttccggaacacaaggtgcgggttgaagtagagttgaaaggggctgaggagctccagctgctgtggaaccaggggccagtcaagagctgcccgggagccacgccgtaaccatggcgaccctcacccctcccgccagaggctgtaaccaaggcgacgtccggtccgcccggccgcttaccaccgcggcggtggtgaggacacaggctgcggtgtaagcccgcgtcaccgccggcacctgcaggaactcggccgctagtccctgccacgccattgaaccttctcaagcacgcgtggcccagccagcaacgcgctctttaacccgcctcccagccccgccttcggccaatccgcatccgaggcgctgcgcgccccaggctgaaaagagagcccctgagcccgacagccaatggaaggaagaagagggaaattaggggcggaaagggagagtgggcgggtagaggctggtggccaatgggcaggcgccaaggttgagcacgtggcggttgttgtggctgcggtggtggcgcgggagaacgtgtggccaatgaggaactggtcatttcgcggctttctaggagaggaccagtagcgtggacccacgacaccacgggggcggggctaagatcgtatgggttacaggagcgaagacccgagcaggcgaggcaaaactggaaagggcggggcgcgtgggcggggcgcggagtgtggcggctcagaccgtgctggctcactaactgacgacctagccacaacgttgtcctcgctgccagcccaagacaggcccacctaacccacagcagggaggcattcgggaatgtgtccaaacctccccaaacgtccagggccccactcaaatgtgccggccgctgtcggggttcttccccgggggcccaaggaaggagaggcaggactgcgggattgagtccaggtggggcgcgagggttgagaggcgcaccagagcaagtggacaggcaggagaggtcctcaatattttggtggaaaatagaaaccaacctacccaccttccttccctccttccctccctccctccctcccttccttccttccaccgtttattaaacaactgtttgcctgacactgttctagatgttggggatgtagcatgcaataaaagacactgtctcttagagtccagccaggaggcagtcaatacaataagctagtgctgacacttgatgagaatattgccaagtgaggggtggggccacgtgggcgtccgcagtgccaggtggggtgacctgggatacctctaaagtttgtcactttgcaagcatccctgtgtccatcaggatggtaactgtgaaaagcaaaacaataaaacaaaataagtgttggcgaggatatggggaaattggaacccttgggcaccgttggtgggaatataaaatggtgcatccgctgtgaaaaacaatatgatcatgactcaaaaaattaaaaatagaattaccgtatgatccagcaatgctgcttgtgggtacacattcaaaagaatcaaaagcagggacttgaacagatgttcatacacccatgttcatggccccattattcacaatggttcacatcagttcacccaccgatgagacagacgaaatgtgctgtctacatgcaatgcaataccattcaaccttaaaggaatgaaattcggatacatgatgcagcatggatgacccttgaagacattacacccagtaacataaaccagtcacaaggctgggcgcagtggctcacacctgtaatcccagcactttgggaggccgaggcgggtggatcacctgaggtcaggagttcgagaccagcctggccaacatggtgaaacctcgtctctactaaaaatacaaaaattagctgggcgtggtggcgggcacctgtaatcctggctattcgggaggct

SEQ ID NO: 150 - DNA, 120590 bp, Homo sapiens
  source 1..120590: mol_type = genomic DNA
gaactttctggggggacgggggaagtgttttatatttgtgctatccagcgtggcagctgctaagccacatgcggctactgagtccctgaaatgtggctcctgtggctgaggaacggaatgctgaattctaactaattgaaatttaagtagccacatgtggctagtggctatagtaccctggggcaccatggggccttcggcctgtcccggactgttcctgccttaggccttgtcctcctctgtcctggccgtgagcccatgcccctggccgtgtccccatgccagatgccactctgcagccccaggtcactgcccagggcggcgcggccagcgaatgcctattggcaggcgaggtctctagcggcagccctttgacagggagagggcacacctgggcagtcccttactgatttgcccctcagagcagggcagacagatggacagcatttcctctgggtggcaccaagccctgctccacctggatggcaccaaaaacttagctgatctcatctccagcttcgcttcctcctcttctgcccagagcagcgctggaccccacccgcccaccatccagcagcccccctgggaaacatgggactcgttctggtcacctctgtctccctccagtcgctggtcactccccacctggatctcagtccacgtctctatctctcagcccctcggtaatccagggcgtccacctgccctgataacttcaaagcccggatcacaggccccagcgtggtgacccagccccgcccagggttaaatccctcaagggcttcctgctgccttccatccccttatctggtttccaaagcccgcttcgacctgcccgccccgaggctcatatcttaatgccattttccttgctctaagcaccagcttccctttcttcccccgtcttcgcccaacactcgttctttcttgcctccaggcctttgcacaaatctggtctctgcctagaacatggttccctctctagtcacaactcctgctcacattttccatctctccttaagaaccgttttctccaggaagccttcccagatggagcggtgcatcccagctctggcgtcccgaggcccgtcccagtaccggggtctctttccagcacgcgcgcgcgcattcgagctcgccccaaactcggccacacaaggctgggcaggacagacacagccccagcctgcctgaggttacctacattctgatgcggaagagtagagatgttttaagaagtgaatatagaaacaagaacacaaacggcgttccagaaataacacacagaagccacggcccggagaggtgggcggggggcccgggacgcttcaggtgggggcggggaggggccgcgcggcgccgtctgcagctgcgcgcatggccggcagggggcgcggcggggagaggcgggaggccgcccccaccgcccccggcccggcccgccctcggccccgcccctcccgccggccccgccccgcccccgcccgcggtgcgcgcgctggcccggcagcatggcggcggcggcgggcgcccctccgccgggtcccccgcaaccgcctccgccgccgccgcccgaggagtcgtccgacagcgagcccgaggcggagcccggctccccacagaagctcatccgcaaggtgtccacgtcgggtcagatccgacagaaggtgagcccgcggcgcggcggcccgggcgcgcgcccctcacgccgcggcagccccggccgaggcccgtggccctgcccgagcggccgcccaggcccggctcggcccggcccggggtcccgcgggcgtcaccgcccctgtcgagcgtgccccgccgctgtaacgggccggcgccccgggcggagcgcgcggcccccgacggacggcgggcggctgtggggccgggcggggggcgcgcaggtgggcgccccgggcgccgcgcgctgggcggggggcgcgcgccgagttgggccgcgaggacccggaggaaactgaggcctagatgcaggggactgcgctcgtgccaccgagcgggtcccacgcgggggctcccggctgcgccccgcgggcgtccgcggtccccaaaccccggttctgcacgtttctcaggagcggtcgggtggtgtcccgcgagtgccctgcagacttccctgtggtgccctcagaagtccgctcggacccgggtgcgagggatcaccccttcaccccttcatcccaaaagggaaggaagggatgcgcgttcagtgaccgtctctctcagcaaagccgggaccgcgcacccgcttggcacccaactctccacggagaactcctgacgctaaatgttagataaagacgcacgtcctttttgcaggaggaaagttgcaccgtttgttttcccattgtgcttcctattgaaaacagcttacggtttttgctccaggtgagcccgcccggttagaacactgcttcctcaggcaggtggctggacaggtggctgcgagcaggctgggtccctggggcagctctggcagatccggttggcacggactttctcctcctgctgcagtgcgcttttcctccggggcggattaggttcagccgttcccttcaccgtgggagccttctcttctgtcagcctttgatacctgcgatgggggaacctgaggtcctaacatgttacaaacaggtttgttgtgaagtgctccagttattcagcaaataggtaccgaacacctgctttgttccgggtataacagtagcagtagtgatgataatgatagcaatagcaaataacaattctttaataagccttctatgtgccaggcactttcttgggttagctttacagcacttgacatggttagtttattagtactggtgagaacccaataagttggatgctatcatctccgtcttttggaattggaatagaaatagaatcaaggttaaatgacttgcccagggtgtcacaggtcgtaaatgtggatgtgtgttggaaccatggtcaggaccgtaagatggaaggcagtttctacacctagggattctcagtctagttgggagatggacgcctgtgcacctgacatgacaacattgtaagtgccgcggaaactcggggcagagacctgccctggggaggcaggagtggtttcctttaaggtgagatcttgagggataaagaattcaccaggctaagtgggtaagaaatggccttctacatatttgaaccttgcgtctagagctttaggcacaactgcgaaatgatcagaagttgggccagaggtggatcacgttgattagacttattagttggaagggttggttagggctgaatttcgaaggggtggtcctttgaggggtttgctttttggccttgggcaagaggtggccacagaggattgttcaaagtatgggggtgatggatcagatgtgcttttgggaagatctccacatagccctaaatgatactgataggagttgctttctcctgttgcccaggcaaggtactgaccagtgtggggtagatcatgtgatttacaaggttgattaagatcaagattgtgttgagagagatttgattcctgggagattccagtgtttagaattttgttggttaggaggtgtttttgctttccttcttttttctcctaaaacaatagctgctataccagctgttctggttgaggaggagtgatgggtagactgttaaaaatacaccccgaggacttagagtttctgaatacagtcacatctgctgtacagatagcttaaggctgatttttcttctgagttgttaagagattgtcagaatgtgggaatgcgaggttgactgtatgtaatagctccattttttttttttccagcagataagccattcacaaaattcctctggtatctatggtacataatagaaacatcaaaaatggtatggggtagcagtctgagtctaaaaagaaaaacagaactcaccttaagtatttggaacagaaggaatgtaatctaggggagtggtcacacaggtgatgtgagaactgagaatgcaggctgcaatgaggcaagccggagatgaggcaacaagcaggaaactgctgccacccctaagttggagggtgaaggaaggagatggcatttcagactccagggacagctgtcacccaccaaaaactggggtcacaaggggtccatctggcagtggctggagccttgcaagggcacagctgctgctgcggatgtactgttcccctcctgcctgggaaccctggccttgctggggtcacctcctccacaacttggactggagcagaaggacaaagaatggatctgaggacaagctggcccaggaccagaactgtatgtatgtcaggcttttaaaatattagtctagtgcaagtcagagctgtcttaatgaagagaaaaacaaaagagaatgtcttagggcagtgctcctcaaattttaatgtgcagacacatctcctagggatcctgttaaaatgatgattatggttgagtaggtctagggtgggtggggccttagaatgtgcatttctttttctttctttctttcttttttttttttttttttgagacaaggtctcactttgtcacccaggctggagtgcagtggtgcgatctcagctacggcaacctttgcctcctgggcttaagtgattttcctgcctcagcctcccaagtagctgggactacaggcaaatgccaccatgctggctaatttttgtattttgttgtagagatggagtttccccatgttccccaggctggtctcaaactcctgagctcaagtaatacacccacctcagcctcccaaagtgctgggattataagcttgagccaatgcacctggcagaatatgcatttctaacaagctcccagaagatgctgatgctgctggtccatggaccagactttgaaaaacaagaccttatggcacacatgtaaagagaagcctctccaaacttcaaataattcttcaggttatagatctttagcatattgaaaatttgatgtgtgcagatttgtgatggccatttatcagtttagcatttcatgcatgtctgattttttaatatgttcgagctctttagagttgaagctgtccacagcaaagacattacttcatttgtatttcctgactacagtacacagtaatgactctgtagaactgcatagctagaatggaaagaaagaaaatggagctaacactccgaccagcacattcaccagcacattataaggtattttgaaatttcagtgaagaaccgtgtaattctgcaaagctatcagttaaaagagtttaatttatttaaaagtttctagaaagttaacattttttggatatgagcatgaaagtgcttggattcctgattttaaatttaaacaaagcattttttccattgtgaaatgaagactagtaaaaattaggtaaagggtttaagttgtaaaaaacttaaaaaaatgcaccgcagttttatgagatataattcacatgggatacagttcagtggttgttagtatattcgctgttttgcaaccatcaccacagtcaattttagaacattttcatcaccccgtttcctctcaactccctcaaccataggcaacaagaatctactttctgtctctgtgtttgctgattctggtcattttacataaatggaatcatacaatatgtggtctggcttctttaacttagcataatatttttaaggttcatccatgtcatggcatgtatcggtacttcatttctttctgttgctgggtaatattccattctacaggcacactgtattttatttatccatttatcagttgatggacatttgggttatttctactttttggctattctggataatgctgctgtgaacattcatgcacatgtttttgtgtggacataggttttcatttatcttggctatacacctaggagtggaagtgctgggccatatggtaatactaccggactattttccagctaaaaagctgccgtaacattttacattcccaccagctgtgtatgaggagggttccaatttttccacatccttgtcagtaactgttattatctctcttttgatactagccatcctagtagggatgaagtaatgtaaaaggtttttaatgccattttattgtcggatttcaaagtctaaactttggtgtcagatgaagtcacttcagaccctgcgcttctagttatgaagcatgcgattgtggacagggtgtctaaacctcccttaagacgtggtttcctcatctgtaaacatggaaaatattagttcttgggttggttgtagtgaaagtaaatgttaactctgtgttcctgagtctcagtttccatgtctgtaaaatagaaataacagttgttatatccataaaataggaatggggatgttaactcatagaattaaatgggataatttgtgtagaacacctaacatagtggctgatgtatagtaaatgatcactaaatggttgcttttggttattttttgtctttctgatttttttttttttttatcccagataggaatcatttccctgattccatttttctccagctcaggctggtctgagtctccatctctcggctccagaagagcaaatacaaacaaatctggctgaaaattaacaaagaccattttttaaagaaatcgttaatttattgagtactagtgggaataccatgggctaggtattacattttgtatttcactggttcagtttaacagcaaatatttgagatcttaacattgttaactgttgtgcgaggcaccaggggtatcttattgagtaacaacaaaaatttttagagatgatagtctagaagacattaataaaacaatcacacagttaatatgaagttgtgatggggacgggtgctgatgaggagagggccagaatactttgagaggacatcataggtgaatttgacctgatatcagggaggtctaggagggcttcttgaggcagtgactggctgggtctggaaggtgagtagggagcagtgccttctgcttctggcagtggtgagctgagtgactgcagcgccactcttccaagcacagtctgctaataagatgatgctgaatttctggactaggatctggggtggctgaagatctgtggaagtgagtgtggtatttggggctgcttttgaccttggaatctgtagtggcgtctgtagtggatttggcatctctaccaaatttggtccacctagaacttcaggatgcccacataataagatattagttaaatatctttaaaaaaattttttttctttttttctgagacagggtcttgctcggtcgtccaggctggagtgcagtggcatactgcagtctctggctgggctcaggcaatcctcctgcctcagccacctgagtagctgggactccagatgcattccatgatgcctggctaatttaaaaacacatttttatggagacgagggtctcactatgttgcccatgcttggggtctcaaactcctgggctcaagcgatcctccccctttggcttcccaaagtgctagaattacagacatgagctactgtgcctggccaaaattttttattttgagatagggtcttgctatattccccaggctggtctcaaactcctgggctcaagtgatcctcctgcttcaggcttctgagtagctgggagcgtaggctcaagccactgtgcctggctaattaaagattttgagagtaaatcatcgtgaacttaggagaaactctaaatccagtgttggtttctttataagaggaaggggagggagatttggacagaaagacatgttgggaaaaaggttatgggaaaatagagccggagattagagttcgttgatgcaaaccaaggaatgcctggggccaccagaagctggaagagataacagatggaatctcccctagagcctttagagggagtgcggccttctgatcccttgatctccgacttccagcccccagagcagtgagacagtcaagttttttttttttttttttttttccaagttttgttttaagccttgaagttttatggcagccctagggcagccctggggaaagaacactgggccctgaacaaaacatgggagccaagaggctgagccctgtgagactgtctgagtgccttagcagggctgaggtgccaggttctgccaaagggcaacagtcctgggtgacaccctcccctcacaatttggattgggatccaaagaagccacttccaaggaatgcgcaggagccagaagtattggaaggactgcagccctgcttcaaatcacctcagtcctctgaaattaaagtaatcccagtgtactagtgtctctagattcccaacagaagcaaactttaatcctctctagagggagatatctccctctaatcctcccagttatcaatggaggcctctaatgactttcacgagtctgtttgtacgttcatgattgtgcatacagtaaaaaaatagacatcaagggaggcgaggcacttgagctaaaaccagtcgaaactacaggctgtagacagacccacagggcttccagactccagacccagactttataacaactgtgctcgttgtgttggaggagacacgagatcagatggagagttttggcagagaactagaaactatggaaaagaaccagatgaaaattctagtccacactggccagatggctcacgcctataatctcagcacttttggactgaggcaggtggatcattggaggtcacgagtttgagaccagcctggccaacatggcaagatcccgcctctactaaagatactagacattttttttttcttttaagacggagtctcactcttgtcacccaggctgtagtgcagtggcatgatctcagctcactacaacctttgcctcctgggttcaagcaattctcctgcctcagccccccgagtagctaggattacaggtgcccatcaccacgcccagctaattttttggtatttttaatagagacggagtcttaccatgttagctaagctggtctcgaactcccaatctcaggtgatctgcccgcctcggcctcccaaagtgctgggattacatgcgtgagccacctcacccagccaataaaagaaaattataaaattgaaaaagcatagtgatcaaaattaactaaccaaaaaaagagcagattagacccaggctgaaaaaattgtgtgaaccagaagatagctcagaagaaaatacccacaaggaagcctggagacataaaaaatggaaaaatttggagagggtgggagacagatatagtaagaaggtcttacttgtgtttaattgtcacaagagaggagaagtgagagaaaattgaggagacacaatatttgaaaagataatgtggccaggtgcagtgactcacgactgtaatcccagcagttttggatgctgaggtgggcggatcacctgaggttaggagttcaagaccagcttggccaacatggtgaaaccctgtgtctactaaaagtacaaaaattagctgggtgtggtggcagatgcctgtaatcccagctactcgggaggctgaggcaggagcatcgcttgaacctgggaagtggaagttgcagtgagctgagaccacaccattacactacagcctgggcgacaagagcgaaactctgtattaaatagaaaaaaaagaaagaaaagtaatacctgagaattttctacaacaaataacaggtaccatgaacagattcgatagccgtatgaactgaaagaaccatatctaatcaattcctggtacacccttgtgctctgcataatgatgtttccggatgatgatccacatggacaaaggtggtcccataagattataatgaagctgaaaaattccaattgtctagtgacgtggtagctgttataatgttgtagggcaatgaattacctatgtgtttgtggtgatgctggtgtaaacagacctactgcactgcaagtggtagaaaagtatagcacatacaagtatatacagtacataatagttgatgatgataataaacaactatgttactggtttatgtatttactatctatactttttattattttagagtatattcttcctacttatagaaaaaagaaaaacaaattgtaaaacagcctcaagcaggtccttcaggaggtatccagaagaaggcattgttatcataggaggtgacagctccatgcacgtcattgtccctgaagaccttccagtgggataggatgtggaggcggaagataatgatactgatgatcctgactctgtgtaggtctaggctaatgtgtgtgtttgtttcttagtttttaacaaaaatatttaagaagtaaaataattaaaaaaattaaaaatagaaaaaaggttatagaataaggatataaagaaaatacttttgtacaagtgtacagtgtgtgtttcaagctaaatgttactacaaaagagtaaaaaattaaattaaaagtttataaagtaaaaatattacagtaagctaaggttaatttgttattgaagaaagaaagtctttcaaaaaataaatgtagtatagcctaagtgtacagtgtttacaaagcatagagtactggtcagtagtgtcctaggccatcacattcactcaccagtcattcactcactcatccagagcaacttccagccctgcaagctccagttacggtaagtaccctatacaggtgtaccattttaaaaatcttttatgacatatttttactgtactgtttctatgtttagttatatttagatacgcaaatacttgccgttgagttatagttgcctacagtgtcagcacagtgatgtgctctatgggtttgtagtccaagagcaataggtcatgccatacagatgaggtgtgtgccatctagatttgtgaaagtacactctgtgatgttcacataggatgaaatcacctcataacacatttctcagaatatatgctcattgttaagcaactgataactgtagcaccgttgaaaaccatagatgaagagaaagagagaaaggcggaggttgcagtgagtcgagatcacaccactgcactccagcctgggcaacagagcgagactttgcttctaaaaacaaaaaccaaacaaaaaaagaatgacagctgtgttcttaacagaaataatggaaaccaaaagtctattgaaatttaagtcctcaaagaaagttactgtgaacccagaattctgtatgcagcaaaaatgtccttcagaaaatacagttgaaataaagatactttcatataaacaaaaacaatgtttttgccagcagacccacactaaaggaaacattaagtgttttttgtttgttttggctaaaggaaaatgctcaagttaagcgttagagttacaggaaggaatagagacttaagggtttctacgtgggaaagaccaaatgattattaactataaaaattatgcctttgggtttaaattatatagaattaaaatacatgacaacaatgtcctgtaggttagaaaggaggcaaatagagtagaacttttctaaagtctttccatttccaggaagaagaacaaagatccaattatattagacaagtcagggatgcatgttgtgtgtaatctgtgtggtggccaccaaaattgtgatagtgtgtgatagctaagctaaacaagaaaaatagaatcagagattctaaatctgaaagaaggcaagaaaggagagaaaacactgaacaattgggacaaagagaaagcaaacagtaagttagtagactgaaatcccagtatgtcagtaatcacattaaatctaggtggacttaaatgctccagttaaaatacagagattgtgagatgggatacaaaagcaaatcctgactaggctatttgaaagagatacgtttaaaacataaggatattaaaagattgaaagtaaaagaataggaaaagatactatgcaaacactaaccaaaagaaacttggtgtagctattttagtatcaaagtagattttaagggcaaaattattaataaagatatgctgataaatgagaaaaagttcattttggatataataatttaaaatttggaagtaatgacttcaaaatatatagaagaaaaattaacacaattgtaagggaaacaaattcataatcatagtgagatgttttaacacacctgtcttacatgctgtatacatcaagtagacaaagaaatttgtaaaagtgtagaattgaacaacacaagaacggaacttttttttttttttgggagacggagtttcgctctgttgcccagactggagtgtaatggtgcaatctctgctcactgcaacctccacctcccaggttcaagtgattctcctgcctcagcctccagagtagctgcgactacaggtgtccatcaccatgccaccatgcttggctaatttttgtatttttaatagagatggagggggggtctcaccgtcttggttaggctggtcttgaactcctgacctcaggtgatccacctgcctcggcctcctgaagtgctgggattacaggcgtgagccactgcacctgccacaagtactaaacttgacctaatggaaatgtatggaacactgtacctaacaattgtagaatctaagtttttttccaatgcacaggcacatttgtcgaaattcactatatgctggccataacacaagtctcaacagctttcaaaagagttgaaattatagagtatgttctgacaacagaattaagccaggatcaataaaaagaaaatctcaatgtatttggaaattttagatgtctatttctaagtaatttatgagtcacagaaagcttaaatattttgagttgaacaatagcaaatatgtatatataaaatggggtacagctgaagtcatgtttagagggaaatttatagcttaaaatacgtatattagaaaagaagacatgctgaaaatcaggtagttagaagaatagcaacacattaaactcaaaggaaatagagtatttttttaaaggatttatagaagaatgaggaggaggaggttgctgatcaaagaggtatgcaaaggccctgtggcaagagggagcttggggaaatcttggggctgaaagaaggctgtggtggttagggctggtaagcatcgggagcctttggttgggatctgacactggagagggttggaggctgtgttagggagctctgcctattttcccccagattagtgggatactattgctttaagattttaggaaggaccatgacctaattggatcgtggttgaaaagatggctctagctgcgctgcggttgcctgagtggatgctggctgacccaatgcagtgaaagatgctggcagcctgggcctgtgctgtggctgtggcgatgggggaagtagctggatttgagagatgctgaggaggtgacattgtgagaactcagtgatggtttggtgtgggtgttgggggagaggaggtttgtgattcctgtgatgagctggataatggaactcttctctgatataaggagctgtggttgaggacagctttggggattttgctgttacctggctctgctgcatgctatcctggaacctcttattctccactaccccagttttgccaatgaacgacatagattcagcagttaggtggcttgctagtgtgccatgaagccatgtaggtctcactgaacccagatagggcctcctttgtcccttcctccccagcccccagtcatgcagcagcagtgaggatggttcatctgagcccgagagtgaggacagtgtgacggggtcagggcccgattggatgctggggccgttggcttttaggaggtgggcagaagaggaagaggaggactagtcaaagaaggaaggactggcaggggaggagaaagaaagggggctgcagagaagccccagaaccagcacagtttacctctaaatacctcagtgtatgtctccacaacatgaggatattttcttatataacaataccattatacctgaaaaaactttttaacatttaatatccagatcattttcaaatttccccagttgaaccagaaatgccatttatgaccttccttttgggaaccaggtacccatcaagttttacgcatcatctttggttgttgttatctctttagtttgttaaattagaacagcttccactgttctctcttcccgttccctacctgcctataacatcaactttttcaagagacaagggcagttgtctggtattaatgacttttttttttttttgttcagacagaatctcactctgtcgcccagactggagtgcagtggtgcgatctcggctcactgcaacctccgcctcccaggttcaaatgattctcctgcctcagcttcccaagcagctgggactacaggcgcccgccaccatgcccggctgatttttttatttttagtagagacggggtttcaccatgttggccaggctggtctcgaacccatgacctcaagtgatccgcccacctcggcctcccaaagtgttgggatgacaggcatgagccaccgcacccagctgtattaatgacttttaatggcaaaaacctccattacttttgtaccaacctaataatctttctggatttttctgattgttttcccatcattcttttacattgttgttttatctcctatatttcctataaagtagaagtaagcagtttcaaagactctcacttctatattttggttgacattttgggcatatccctaaatatggaatgctctgtgctctaccgcatcccacttggaggtgggtgtgtcctgtcaggctgtccccctctgctgtgtcatcgcttggtttacagatttctaggtcttttcttcctcttttttttttctttttttttttttttttttaatagaagtgggatctccctacgttaagccagtctggtcttgaactcctgacctaaagtgatcctcctgccttggcctcccaaagttctgggattacaggcatgagccaccttgcctgaccagatcttttcattggagatgtgatttcccctttacagttaggaagtaataggtgattcctgggcactgtgcaaatatcctttaccccaaatggtttccatattcatacacaatacaggacttgcctgaagcaattttattataagagtttttaaaatggagattcctgccacccccattgtgtcatttattccacatttatctgttggtgttattctgtaaagatattttcttggggccaggcgcggtggctcatgcctgtaatctcagcactttgggaggccaaggctcaggcgatcacttgaggtcaggagttcgagaccagcctggccgatatggtaaaaccccatctctactaaaaatacaaaaaaattagctgggcatcgtggtggacacctgtaatcccagctactccagaggccgaggcaggagaatcgcatgaacccaggaggaggaggttgcagtgagccaagatcacaccactgcactccaggctgggcgacagagcgagactccatcaaaaaagtgaaaataaaaggatatttgctcacttcaaccgagttaaggaccacagttcctcctaaaaaggcaggtcaattgctggattctttgtttaattaccaatgttcgaggtaaggatttggtaaatagtcatccccagtagaggcaaatgtttctctccccccaaccctaaacccccacacccaccctgagtatcactatatggattcatggcaatttttattcagtgttttacaatcagttacagtcattctttttgatgctaaaattatcctgattttcctggaaacacaccttcatctggctctttggtctttaaaggcttgcttgctatgttgcgatctgttttcatcttctggatagagtcctggagctggagtttcaggtagaagggacagtgtgcgtcctgtggccgaggctgccagcccacagcgtgcattgctgcccatttcctgccagtcctgggacgagagtgcctaggagtttcaagatttcaggctggcaggtctttgttttccttttttggattggcttaggtttagggttgtctcagcctcataaagtgagttgggtagctttctgtgaggaaggcttttgtctctgcctctcatattgcatctccatttattttattttttggggggaggttctcatctgtaggttagaccatctgtctccttaccactctgtccatctcagtatttttccctgtccactgtatccatcagcattctgggggcctcagttttgtctttttgccaccagtgacattttctgtaatgtacatttttccctttgactccttccagttggattttaatttttccgtagtgtgattgtttttgttttctaatcttggtcagcatcttagcttgttgtcttttaatttcaacctattctcattttggtgctccctgtcttttaaaaacattttaattttaactttttaaataaaggccacgtcttcctgcatcttaggacaagaatcacatcttttctaaaatggtcttccattttctgcaatcattcatttcaggtttgtgcatgtactttatggcatgtttttccatcagcctctcccctccccctttctgttctgatgtgatgttccttgaatggcgtttgccaggctgcgggtttgaattgctgtttcctggggacttggctgggcacaatctggggctggccgtggggtgatcggccacgggcccaggctgtgtctctgctgctctgggcgggctctcccctcaccttgaattcatgtgcaatggccccattttccgtgtccatgtgtgttcctgagtagtgggtgtttgctgatcacctgctgcccactctgctggctctgctcttctgtgtctgagggtaaagggtgtctgcctccctttcccctgcaggaagggctggactctcatcccctgatgaatggtgctttgtccttatagaatgatggaagagggacactctttttcttttaaacctgctattttaaccattttaaagtgcacagttaagtgccattaagtacattaatggtattgtgtaaccatcacctctatctagtttgggaacttctgtatcccctacatggaaatcccttccccatcgtgagtcactcctcatttccccctcctcccagctgctgacaaccactaatctgctttccatctctatggatttgcctattctggatatttcatttattatttatttattttttagatacagtcttgctctttctctcagggtggagtgcagtggctcaatctcagctcactgcaatctctgcctcccaggttcaagcgatcctctcacctcagcccccccagtagctggcattacaggtgcactccaccatgcctggctaatttttgtatttttagtacagagggggtttcaccatgttgtggccaggctggtctcccaattcctgacctcaagtgatctgaccgccctggcctcccaaagtcctgggattacatgcgtgagccaccgcacccggccactgagcactgtgttttcaaggcttatttacgttgtacgtttcagaacttcttctttttttttttttttttttgtttgagtgaataatactctgttctgtcaatgtaccacattttgtttgctcattcatcggttgacagatatttgggttgcttctaccttttgactattgtgaatagaactgctgtgaacattcatgtacaaattattatttaaatacctattttcatttattttgtatttttttttaaatttttgagacagggtctctgtcacccaggctggagtgcagtggtgcagtcatggctcactgcagcctccacatcttgggctcaagcagtcctcccacctcagcttcccaagcagctgtgactacagatgtgtgccaccatgcctggctaattttttaattttttgtagagatgaggtcttgctgtgttatccaggttggtctcgaacactcgggctcaagtgatcttcttgccttggcctcccagagtgctgggattacaggtgtgagccactgtgcccagctgacctgttttcatttcttttgggtacgtacatgtgagttaaattgctggataattctgtgtttatcttattgaggagctgctaaaccacaaaggctgcaccattgtatgttccctccagcagtgcatgagagttctgatgtttccacacttgccaactcttgttactttccacttattataatataaatgttataatatttaataatttaagaatattatattattcagttcctcaatgactaacaatgttgagcatcatttcatatgtttattgaccatttgtatatattttttgaagaaatacctattcaggtccattgcccattttccaatcgggttgtcttcttgttgttgaattgtaagagttttttatatattttgggtactagaactttatcagatacatgatttgcaaatatttcctctcattctgtgagttgtgttttcactctcttgatagtgtcctttgaggcacaaaagttttgaattttgatgaagtccaatttttttcttttgttgctcgtgcttttggtgttatgcttaagaaaccattgcctaatccaaagacaagatttatacctatgttcttccacgagttttgtagtttcagctattattaatatatttagtctttgatccattttgagttattttttgtatgtggtgtgaggtcaggttccaacttcattcttcctgtgtggatgtgcagttgctccagcaccagctgttgaagaggagcgctctccagttggagtctgcctccccagctgtgcagacagccctgcagtattgaaaaacagccacagagctcctcaggagtgcttggaaatctcaatggagttcataaagtgattcttaatagaatcattcttatgtatggttatgagacatttacatatttaaagagtttaaaaggaagtatctgcatttcagaatttttactgccatggaactcatctacattttattttgttttattttatttttttcagacaggatctcactgtcacccaggctggagtgcagtggtatgatctccgttcactgcagcctctacctcccgagctcaagtgatcctcccagtcagcctcctgagtagctgggaccacaagcatgcaccaccacacctgggtaatttttgtattttttgtagagacgggttcttgctatgttgcctaggctgtcctcgaattcctgggctcaagcaatccgcccgcctcagtctcccaaagtggctaggattacaggcgtgagctactgagcccagcctcttctacattttatgtttgagaatatggacttgattcagttctttttatagtttggtaaacttgaaataacactcatctcattaaatccagtctcatttgacattctcagtatttgaactctgataaaaatggactagtactcagaagctgggcagaagggaagtctgagaagttgttctctatctcctttctctctgtggttgctgaacatttttgtgtgcttcaagagggcaagtagaaccaggtttgtcaagaattaagacataagtcttttttttttaatttttattttttttcttacatttaagggagatctggccaatgtgtatttttattgtccattagtcacaattgtctgtgtttttatatctaactagtgttttgtattatttgctgtttgtagaaactccttggtagttaactgcagcttctttgtcctctggcagcagaaatgggtataaccatttgggaaagtgacttagtgagtgtctgaataactccaagagactcttggtccagaattctaacactgggactctatcctgagaaaataatcttaaatataaagctcatgaacaacatgtttattgtaccattaaatataaaaagttgcaagccaccccagtgtccaagtccagcttaggacaaaccccaccagaacactccagtgtaatgactcagtgagttaatgataatagctgataaaatgggtactgcgggcgggtcccgtgctgtgctctgtgcgcgtgctgtcccacttcaccttcacaacttcatggtggctgcaccaggtcacaaagctggaaagtggcaatgtgcatggctctcaatgcctgaagctgccagccaggtaattgaggaggtcagcaacagggacggtactatgtgatgttggagaaataaagaggcgaagctgtgtttacagaatgcgtttcagcagtgtgtaaaacactggaaataagatggaataggaaataacacggaggaagtttcttatgatattgtgggtcgggttaggtggtgagatttgtattatttttatgtttacatctgcttgcctgcattttctaaaatgagcatgtattattttataccaaaggaaacaaaaaggcataacatgcttcccgtcaatggaagactcctaatggtaagaggggctgtgttgtgacgtggagatgattcagattggagaagcagctgccctcagccttatctggaatgtcctaaaacagctgaaacgatactgttggatcaaaacagattgaatttcaggagtcaaatatacaaaagggcatgcttgtgaaaatacaggatttaagtttcataatatcctaataaatgggtacattatatggaacgacttaattatgttcccccttgtttgaactttcaactcctgtgttgaaattaaatctacacttacctaagaagtgagctcaaggtcttgatatgaataggatgtattttagcttgagatgtaaactgtttgatgcgtgcaatgttatcagttctttagataatgttcataatgacattagcatccctaaacatttgaataaatgaaaaagaaataacatatagaataataatacacaaagtaaaagcagatctagttgcagtatattgttgtttggaaaagcaagttattgaataatttgtacatcatgtaactcccctttatgtcttttagtttaattttttttttttacacagggttttttttgtttttgtttgtttgtttgtttttgagatgaagtctcgctctcacccaggctggagtgcagtggtgtgatctcggctcactgcaacctccacctcccgggttcaagtgattctcctgcctcagcctcctgagtagctgggattacaggtgcctgctacgatgcctggctagtttttgtattttcagcagagacagggtttcaccatgttggccaggctgattacgaactcctgacctcaagtgtgccttctgcctcagactcccaaagtgctgggattacaggcgtgagccactgcgcctggccttgacacggggtctcgccctgtcacccaggctggagtgcagtggtgccatcatcactcactgcagccttggactcttgggctcaggtgattttcctgtcttggcctccccagaggctaggactacaggtatgggccaccatgcccagctaatttttagattttttgtagagatggcatctcaccgtgttgcccaggctggtcttgaactcctgggcacaagtgatttgcccacctctttctcccaaagtgctgagattacaggtgtgagccatagcacctgacaattttatttttacatttttctttttagaggcacggtcttgttctgtcatccaggctgcagtgcagtggttcagtcatagctcactggagcctaaattcctgggttcaagcaacttttctgccccagtttccttagtagctaggactgcaggcgtatgccaccatacccagccaattttaaaagtttttatagagatagagtctctataaaagcagagggatactttactatgctatgttgcccaggctggtcttgaattcctgggctcaagtgatctgcctgcctcgtcctcccaaagtgctgagattacaggtgtgacataccatgcccagccccacttttctgttttatttacacacttgaaaacagatggagccgggcgtggtggctcatgcctgtaatcccagcactttgggcgcccaagtccggtggatcacccgatgtcaggagttcgagaccagcctggccaacatggtaaaatcctgtctctactaaaaataacaaaaattggccaggcgtgatggcacacgcccgtagtcccagccacttgggaggctgaggcaggagaatcgtttgaacctgggaggtggaggttgcagtgagccgagatcgtgccaccgcgctccagcctgggcgacagaatgagactctgtctcaaaaaaggaaaaaaaagaaaaaaaagaaagaaaacagatgggaaggatgttatctcggcatgtgaatagtaggtgttagcgtggctgggctcttggtggtcttaagtaaataaaaagtaacctccagcaaacaagtctgccatgagttgggccatttaacacaggactttattctccaaatgtcagaaaacaggtgaggaagcagctggttgagcacatgccaggggagaggaggttgaatgctgatagtggcagcactgccgcattgttctcaggtgcttttctgtttggtgccttgccctctgaggtgggatccataggtcaggaagctggggaggctgcctctagtccaggcagcaccagcttcaggcctctggtgtgtttcactgacttccaagtttccaaagcgccctgtctgcacccctcttatgacacttgaaaacaatttatggaaatttccaagcagacacggaagtagagaccgttgaattaatcacatcagcctgtgtctttcttgtttcatctgtctccaccccctacccacacccctacttttctcctgagcattttaaagcaaatacttctggttcttcctactgtcaagtatccctctgatggagcagtttcctgaaaggtcaagggtcgagtccctttcactgtagtattgcaagccacactcagcactcaagtgttcaataaacatttattgaaacagagtgatttcattccacagctcgatagggagatggattttgttctgtaggtttcgcagaagctgaatctttcctaccttaatgaaccacagagcgcatgtgtgtattttgggatgtcgcacctgctgctgggggttaaggtttgtttcgcctttggtgtgtagtggagatgggtttgtgcataaattcactttcagaaaaagtagggtgactggttatggctataatttagtctgaacttgtacagacaaaaataatgaaaagtaaatcttccccagacataaaaaatgtttttcatttgctgtctaagcatggagagagttgaaatcagacagatctgggtctgaagtccacatctgtcacttcactgtagatgtctatgtcctctctggaccccaatttcttcattagtaaaatggggctataactattgtatggggcagattaaatacagattctacataagctcctggcacatagtaggcactccataaatactgattatttcttctccttgcccatggttctgtgaaatgggaatgtttcctgggcctcccttaggaggtcattgtatggatttttttttaatatatatgttttttattatactttaagttctagggtcctttgtagggacatggatgaagctggaaaccatcattctcagcaaactatcacaaggacagaaaaaccaaacaccgcatgttctcactcataggtgggaattgaacaatgagaacacttggacacaggaaggggaacgttgtatggattaaatgagtaatctttggaaagtgcttacacctgagcctggagcaagtcagagctcagcctcctgggtgctgctgcgggtgctgcccctgtcctgggagtccttttaaaatcatgtgtgtgccttccctgtctcatctaccctgttccctttccctagaggtaaccacttaaccatttttattattattttggttaatccttccattgtttctttttggaaaaaaaaaactaagtttatcttcttcacacacaaacaatgtcctcctttttacaaaaagatattaatagcgtagcatgttccttttttttttttttttttttggagacggagtttcactcttgtcacccaggcaggagagcaatggcacgatctcggctcacttcaacctccacctcctgggttcaaacgattctcttgcttcagcctcccgagtagctgtgattacaggtgtgtgccaccactcccagctaattttttgtatttttagtagagacggagtttcaccatgttggccaggctggtcttgaactcctaacctcaggtgatccacccgcttcggcctcccaaagtgctgggattacaggcgtgagccactgcgcctggccccttaatagcatgttctatgcatgttctgcacagttatctttttacttgctctgatttggagaggttccgtagtgtataaaaatatcttccacaatccttgtatagttatatggtactccatattttgaatgtaccgtaatttattcgaccactagcctgttggtgggtatttgggttattttcagtgttctgctataatagtttgtagcacatagccttgtacaaacttttttttctattttgccaaagtgtcttttgggatagattcctaggagtgggcttgctagatcagaagagtaaatgcatgaataactgctctggattttgccaaatgtttgtcttcagggccatcccgttttgcagtcgtgttgagtgcctgtctccccgttgccatagaagcagaatgtgttgcctctttggtttttttgtttgtttgtttgttttgagatagagtcttgctctgtcacccaagttggagtacagtggtgcgatcacagctcaccgcagcagcctcgacctcttgggctcaggtgatcctcccacctcagcctctcaagtagctggagctataggtgcactaatttttaaataattattattattttttgtagagacagggtctgtgttgctcaggctggccttgaactactggtctcaagtgatcctctcacctcagcctcccaagtagcttggaccacaggtgtgcaccaccacgcccagctattttttttttttttctaaatttgaggccgggtgtggtggctcacgcctgtaatcctagcactttgggaggccaaggcgggtggattgcctgagctcaggaggtcgagactagcctgggcaacatggtgaaacccgtctttactaaaatacaaaaattagctggatgtggtggcgggcgcctgtagtcccagctactcaggaggctgagacgggagaattgcttgaactggggaggcagaggttgcagtgagccgagattgtgccactgcactccagcctgggcgatagagtgagactccatctcaaaaaaaaaaaaaaaacttgtagagatggggcctcactgtgttgcctaggctggtctcaaactcctgggctcaagctatcctcccgcctcagcctcccgaagttctgggattacaggcgtgatccactgtgctcagccttgtttgttttttgtcagtctgatggtgcaaatagtattttcacttagttttgtttttctcttctgagctaggttgagcatcttttcctttgtttaagcgccttttgcatttttttctgtcaaatgttttcatattttttgcccctttttctaccagatttttagtctgttctcaatttttataatttctttaaagattagggatattagccctttgtagtattttgtaaaacttcctggcgaggtgtagtggcttatgcctgcaataagggaggccaaggcctgaggattgcctgagcaacatagtgagaccccgcctctacaaagcaaagcaaaacaaaacaaaacaagcgcacctgtagtcctagctacttgggaggctgagatgggaggatctcttgagcccaagaggtcaaggctgcggtgagctgtgattgagccactgtagcccagcctggttggcagtgtgagaacctgtttcaaaacaaaaacaaaacttcctgaggcactggcgtgattaagataaataaacccactgaacctgagggactgttggtctggggagggagacagcctcataatggatgttcatgtacttgcaaagcggtgatagctagttctgcctggggggaggtgatagctagttctgccttgggggagtctgggaagacttcccgaaggtggtggtatttgacttgggtctcaaagcttagtcatttcccagccaagagaagaggagctgaggatttccaggcggaggaaagagtatattcaaaaaagtggggaaataaaaggagttggttgtgtttgggtcaggtggttctgggaggggtgagagaggagcctctcagattgggaggagcccggtgggccacgtgaagccttcctagatgacaaggaaagcaaggagaggtttgggagtgggccctggctctgagactgtatgcttcttccagtcacctgggagtttttaacactgtggctccctgccccctcccacactgatgctcatcactggtggggtggggccagtggtcactgtttctcaaagcttgtcaggtaattgtagtggcagttgggatgaaatcctcccgttgagagaattgtggcagcaggttggaggaaggatggacagagaacaaacttggtgtgcttaggaaccacctgggctcttggcaaaaattcatatttccaaggctcaggaggttgggagtggagcagtaacttgctttttctttacttttttattttattttatttctatattattattttaataacctgtattttgtttttagagtagtccagtgaagtagtgagaatggggtagagaatagagcaaggagttcagtctgtaactgattgtgaaccatcgtttgagatagctcactgccttcaggccagcggtaacctgcatttttaacaaacgttccaggggttctgatgtggtggtctgggtcacacgttgagaggcactgaggcagagacaagaggcagaacaacttaagcctgaggtaggcggagctgaagaggaggggcagaatcttccattattttaacaaatacaatcaatgatcctaggtaggcaattagaaatggggagtgaaggaggaaaagagttgagcacctgctacttcttttagatttgatgatgctattaatattaactaaagaggaaacgtgggggtcagtgaacagtgagatgaggtacatttcagtgtggaggcctggcccctggggacgccagcctgcaagactaggttggattagcagtgatgctgacagagcgggagtgaactcagccaacccatcgttatcagacaggaatgcatttggctgtaggttgatgtcatcaggacccacactggctaccttgtggcctcagcatggctgctgcagcactaaatgttgtatgttcatttaaagcaaaggtggcactgagactacacgtgttcccatataccagccaagcacttgcctacctccccacccccaacagaactgcttaggtctccttgaccagtactggggcagtggggattagccctatgatgaaaggtcccccgcgaccaccacccccagttcagaaacaaggtcctgtgagcagtgaggatgtgtgtgtgtgtgtgtgggggggtgttaacaccacataccgcagcataccgcagtaagagaagcgtcctggctttaggaaagtgggtgtgaactccaaatgaggggcagacctggagccgctctcctgggggtttgggcatacacatcgttgccactttttggcttttttgggtttggtccttcctcacattagtgggggcaggaatgaggtgtctctcctcctgtcggtggaggctttggcataggagctttgggacatggtcgtttttaataatcctggtggcagtgcattgaaaaccagggtagtggcaatggggaaattggattctcttgatgggtaagggaaggatgactgtcctttttccatgagttggtgttttggagtcttcagaaaacctatgttgggttcctttctgtcagagttagcaccagactcagggcctggctctgcagagctgagcgggattctgcagtgcggcagttgcccggtgcgctctctcctgctggccgttggtgtcatgaagacgctgatgtggcacacactccgttgccaccttgggcgtgcacactccctcagcttctgccaggatgcggtaagatcagcttataggtagacaggtggtgggtaagttgcaggtagttcctgaatgaggatgaatctgtgggtagtgttttgagtagatacaggaatttacctttgcttaattgatttaaatccgttatcagcagacttttatgctgaagttttattttgccaacaagtattattgtctgggctctggtgtgtcattcattagccaagtggccttgggtgaattacttaatcctctggccctcagtttcgtaatgtgtaaagtgggaatattaccaccactttcaaaattggtgtgaagattaaaagatgaaaatggctcctacttgggtagtggctgtggtatgtgtgaagaagtgttggagataacctggaggtctttgaatatgttttgcatgccttacgttttgtgaacaaattattttctgattgcttcctatatgtgaatcatggtgcttgtaaactgcaaaccacagatgaagctttagagatagaattggagaggcctgggatttcttttgtgacctgtcattagttgttcaaccgggcaagttactcagtctctctgtttaccagttttcttatttgttaactggaatactagtttctgtctcatagaccagaagtgtttgttctgttaagaagacaagtaaatataaaaatactcatgaaaatttaaagtgatatgcaaattgggccaggtgcggtggctcacgcctgtgatcccagcactttgggaggccgaggtgggtggatcacccaaagtcaggagttcgagaccagcctggccaacatagtgaaaccctgtctctactaaaaatacaaaaaattaaccaggcatgtagtgcgcgcctgtaatcccagctactcgggagggtgaggcaggagaattgcttgaacctgggaggcggaggttgcagtgagccaagattgtggcactgcactccagcctgggcgacagagcaagactctgtctcagaaaacaaacaaacaaagagatatgcaaattgatagaaataagtttaccagcttctttccactgaaacatttgtatgttaattttttattccagtatttccacttttggggggctttgtgaatttgggtgatgttgcttaattaaccatagtcaggtttctgttttacctgcttttttgttgttgttgaaggaccggggaagtctaaaggacagataggtggctgaagtggacatttggctaattttctttcctttctgctactttttttttgtttccctccccagtttcccagctgtctgcctgcagcccctctgtccaggtcaccttgggcaggctgtggcttgctgccctcagcctctggacacgactcttggtcagtcccctccattttcttcacccccacgtggcagctgtttttcatttgtttgtcttttactgcgtaaatgtggaaatcctcactccttacatgctcaagacattaacactaatagtctgagattttacttctatccttatattgattaactatatttttccctttaccattttacatgcagaataatacatggagtatacacataagttgtgaagcacagtcacggactgtgcacacgtggacccacctgcgcggctgagtgccagggtgctcttctgtggcatcctccagggttaagcatcctttggggcttagtctccatttgacttactcttctggtaaatgccggttcacactttttacctattttctctttggtggtttttcttttttatcattccgtgggagtttctttttttctttctttctttctttttttttttttgagagggagtttcactcttgtcacccaggcgggagtgcagtggcatgatctcggcccactgcaacctccgtctgctgggttcaagcgattcttatgtcccagccaccgaagtagctgggattacaggtatccgccaccatgcccagctaatttttgtatttttagtagagacagggtttcgctgtgttgcccaggctggtctcgaactcctgacctcaggtgatccacctgcttcggccttccaaagtgctggaattacaggcatgagccaccgcgcccagcccgttccatgggagtttctgctatattctggttactggttactgactggctgtcagcagtagtgtacctttttttcccaccttggcttttcttttatctctttctgaggtgtctttgatgagcagaaattctcaattgcaatatagttgagtttagcagtcatagcttatatctaatatttttttctattacatttaagaaactcttcccaattccaaagtcattggaaattctctgtcgtctgctggacgttttgaagttcttctgccttttgctgtagcgcacccagagtctgccaggagctcacgcgtgtggtgtccttggctaacctgccatctcagcccctttgctgaagtccccctccctcccaaaccctggtttgcagtgctgcctgttacacatcaagcttccaaatctgcaagggtctgtttctgggctatctttggtccccaaattccgcttctcttaatttgctttaaggatagttgaggacataagcagatatttacttacgggaatatccactgaagttctgatgatagcattgagggaacgggaagcattctaaatgttccggcagtgggaagcaggtgaatgatggaggggagggtgtgtaggtgccgtgagatactctgtagccggtaaaaatgcatttgctgatgtggctatatggtgataatatacatgacaaaaaaatagcaaggtcacataacagtatgtacagtatggattccacgttcataaaaagaaagttgtaagttgaaaaaaacctgttatcttgctttctcctgtcctggtcacactcagggtgatttgatctggcttcgaccccatcaggccaccatgtccgctctggcaggtcctcggtgaccccctggtggctgcttcctttatcctcagctcagttctcatttatgacctcgctgctgcattggacatcactgatgcgatcttctcgacgtgctctctgctctcctccgcttctgcccactttcttcttgttctcctttctggctttccttccttggtattggtgtccctgggttcccatttccctgggcctccgtgtactccatgctttctcctttggggcccttggcaaggcatctcctgtgttaaaacttctacatcacagacctgcagagctggccgtcgccttacactgaactcccctgacgtcctcgaggcccgcagagtcagcacatccagaatgaaacccacatccccccactgagccacactctttggaggcatccaggatttctgtcctgtctcctccccttcgcctcggtcgattctcacatctttctgaacattcccatgcctgtgtccatctctcccctgccaccccagactcttgtcatcagctccccccttatgcgagtttctggagtgttctgccagcctccacatttcacccctcttctttcccacactgtggccacagtcagctttccagagtgtatttctgagccaccaccgggctctgtctgtagccccagggagcagctgccggcctctgcttgcccagcccctcctccctggcctgctcaggtacctgttgtctcaggcagctcccttatggggcattgctcactgccctgtgccccacatcccagagcactctggtgtgtacacatccgccttcctctggtctgagctcctggccatgcagccctcagagcccagtgtagtgaccagcatctggtgatgcagccacgtgtcagagagggggcaacctcaccctgtgcttgggcctgctagtgcctttcagacagagtccattctggactttccctgcctcctggtttgaagcccttttcaaggacattctcagagctgtcttactgttaagcaaggaccactggagacttgcgcttccccccaagcagctgcacgtggtagtcttggacctgtgggctgggcatatgtctgtcgggtcagtgggtggccgtggaccacactccagctcaggcccagtgctctcgccaacttcctctggggagcccagcactgggattggtgtcttgcctgtgtttgctggtgggcgcgtgttcactttccacctgctgctctctgactggagcttaagagttttctcggtgctgtgtgtgttgcaaatttgtctctgattggaataagggtatcttagatggcttgaacgacagttggcccttttgtttgtgcatagaacccaacaaagtgactctaagagcccggtggcccggcatggcccgagcgaactgtgcaggggcctggccctttcactcctgactctgctctagggggcaaggagaggcctcgtcagcctagcagcatttcctgtgggtgcctttcacagctgccacgtgcaaaatacagcacattattttggggtgttattttcttgaccacttttggttcattgcttttgactaaatgtttaaaaatattctgcagcatatctatagtactcacaagcagcgaatcaggagaagaaatgcagtttctgagaaggcttcaaagaaataatggtctttatcttttccccagccttttccgctgaaacccaccagtctttttctgagcactcttgttataaataaagcagcagctctccttgggcagcccaagatcgcagactctcatccgccctcagaaagattgtgcgtgtgcgtgtgtgtgcgtgtgtgtaagtatgtggtgcagtgagttgtgttttaattttgcttttcttttatgtatgagatgtgtagcaggagatgcaagaaaaaatactccagcatctgtcctttaaagataacttataacttttctgggttttgggttgttggttttgtcttttttttttttcccatttagggaagagatggaagtgattgctttccccacaaaggtaaggaagatgaatggggggccaggagagacgtcttcacagtgaggcctttgaggtcaacagagaaagggtctcgtggtatatgtttcaggcttccatggatggcattgttctgtgcagatgtatttgaaatgagtttcatccatgtgtacttggatgtgaaaaggatgtttggaaacaaataccatttcccagtccttcacactgaagactggtttatatcctcgctaccagaatcggggtgggactttctgtctgccttggatcacccttggtctgttttggacgggacctcagatgctaactgtatgctggggatccccgctgtctctaggggagggggtgggggtggggaggtcacttctggcaaacaagcgtcatcagaatgcttgatcgttggataatgttgggctcctctctttttccttcctggcactctttaattactggggagagggtgggtgccttcttcagaagtgtgaggtgaatgtataagccaagaatgagtcagtagattcttcagcagctctgccctgcgctgatcctctagagttggaaagggctgctgttgtgccactgggtcagtgccaaaagcagagttcaccatgattggcacatgctggtgagcaagaagctcttggaagtggtcgtgagtgcagccagttccccccaacccaggaagggcacagtgaggatggctggttgcgggataaggagaagagacccctaggcagtttgcattggcctgtgctgtccgggtgtggtcctggtgtccgtccacatgttgatggcgtgtcgggctgggggctttctgcagccttccctgttccactgtctctcctgttgtgaatgccggtggatggaacaggcagcgcagtgttctgcgcttgcattctggcataggtgggggacatgagcctcctgtgtcttgcttttgctggttttatcttagggagttttaagtgtttgtggatacttaagaactttgtacatgcactgtttgaaacatttacgtaaagtgcagagctatatgagattaggtagttaagcaaaagcttctctgaaccaatgtgcttgtctttgaacagaatttttaggaagcctccctccatttccatgctgaggctccttgtggactgggcatttccgtgaggtgggatgtaacatagtgtgcgaacgccgagagccaggttcttgtcttcatgcttgtcgtttattctttttgattgtgttaatggctccgagtacgtcaaaacatctcatgaccaagtagttagttacgcatttgatgttttggtggcatgggctgcgtaaggcgggagagcagctccgggagaagtagagcccccttcattcttggctttaattgagccaagatgagtggaccgtataatccatttctggattctcgtaagagaacgtcttgtgttggggtgaactcatcagcttttcgggttgagaggagttttagtgtctgtggccgaggcactttcctctcatggtgtgtgcagatgcacacgccaggcctgtgagtggtgggttgggctgagggcgcgggcctggagcttctgagccccagagccgctgacgtagacagctttggcagcagcatcctgagaaatggcagggggccagagaacacagagacagggccaagaatagctgaaaaataccaaatgctgaagttggagaatgcactggccccgcgtcccagtgtcctcccagctgctgtgtactgtggccctgtgagcctcagtgtcccttcttcatgtctgccagtgcgtccagggcacaccctgggcctcttgacacccccacccacacaggcacacattgccccttagaggacaggattggtgcaaccccccatgcccccggcagcgtgctgggcctgtgcataggtcaaggtctgttgagagtgtgagaaatattttctgttagagacacgaatatgtttcagccgcaacaggctgcgtttcagccggaagagtgaaagggcaccttgaaaacgcaagtttatgaatatgtttctgtactttcagaccatcatcaaagaggggatgctgaccaaacagaacaattcattccagcgatcaaaaaggagatactttaagcttcgagggcgaacgctttactatgccaaaacggcaaaggtgaggccccatgcaggaaagcacacgcgaggacatcacaggagccgtcccaggggaggaactgggggtgctgagtccttgtgtgggaaaagcttcaattctcagatctgttattgccagtgagttttgtaacactccacgctgtcaggttttacttgtctcaaggcatgttttatttcttatcaaaattaatttctgttcattttccttttctttaatgtcatcggtaatggggaaaaggaaaaaagggtcacagagacagccgcgttacagctggatatctctctctcagaaaggcggagggaatcacggggctatgaatttcatcttcttattattaaataatttttattctttaagtatattgaagttctttttttttttttttttttttttgagagggagtcttgctttgtcgtccaggctggagtgcagtggcgagatctcggctcattacaacctccgcctcctgggttcaagcaattctcctgcctcagcctcccaagtagctgggattacaggtgcctgcaaccacgcctggctaaaatttttatatttgagtagagatggggtttcactatgtaggtcaagctggtctcgaactcctgacctcaaatgatctgcctgcctctgcctcccaaagtgctgggattacaggcatgagccaccgtgcccggcctagagatggggtttcaccacattgcccaggctggtcttgaactcctgacctcaagtaatctgcccgccttggcctcccaaggtgctgggattacaggcatgagccactgtgcccagccaaagtagaaggagctgagcttcttgatgtgtgaacagaaatgggaaattctttatttttaggctttctagcaattaaccttgtttctgtgtgccctattgtaggtagatttaaagctagaagcaccaggtgggtgctgctggaggaggagcagccagtgaaagtcacagattactgccatgtttaagcggatgtggtgttagacattcagacaccagtgtgttggctgggattctgaatacctgtgttttttatcaggattggtgtcagtactaatattttggtatttaagaaatctggagtctgaataatttacattttgagacatatccctagaaagttactgcattaaaatttgaaatggaacaaagcagcttgtttagaaagggttctgaccacttccctcaattaaaaaaaaaaaaaaacacgacaaaataaccttttacagttagttctggtggtgcggggaggggaaaggttacttaaaagattgagtttcttttctgagttattagtttgattttctccagggttcctcatagagccatcgtagaatagaggggatggtataagggaaacaggaggcaggggctgtgccgggggaccctgtagggagtggagagggagacgggggaggtccccaggcctgactcccagccctgccctggagcatctttctctccaggaccaggatccttctgctctactcccttgtttcctttcacggccagaccctttccatttggacctgtctctcttctccagaagaatttgttttagccaggaccttccccctccatgtgctcgctggaggaacaagccaggaggacacggaatcctcagtccagaccccggccttccctcagctaaaacactgtgtgagaacatacttcacatgtaaaagtgaatactggtattgacagtagtaaatacagaaataccagcattgggttgtttgctttggttctctctctttcttccttcactaatgcaatgacaatgtttgtagatttttttaaaaaaatcatggcactatacctgtgagcccgagcttttggttagaagcaggtgggtgggttaatttggattggcttattgattggatgctacagtttcaaggtactggggcttctgtgggtgcttgttagggatcattggggtgtggtgggcagcgctggctagtgcttagggatgtacctgtctttatgtgccttagtccctgtgtttgtctctttctagtcaatcatatttgatgaggtggatctgacagatgccagcgtagctgaatccagtaccaaaaacgtcaacaacagttttacggtaagattcctcagtcatgcctttcttgattcttcactgaagttggctttcctttttgatctgaacatgtgtccaagcagttcaaacgttttcattcttttcttactgattggaatgattgctggtaaaatttgaatttaatgctgaaagtaatactgtggttggagaataaccaagaatttggcatgcataagcacaaaaggacaatagggaccaaatgaaaaatttttatatgtgttttggttcacgtctgttttgttttttttgagacggagtttggctcttgttgcccaggctggagtgcaatggcgtgatctccagctcacagcaacttccgcctcccgagttcaagcgattctcctgcctcagcctcccgagtagctgggattacaggcatgtgccaccacacctggctaattttgtatttttagtagagacagggtttctccgtgttggtcagggtggtctcgaactcccaacctcaggtgatccaccctccttggcctcccaaaatcctgggattacaggtgtgagccaccacgctttgctggttcacatcttactacctctgtacagagttttgttttttgtgattaatgtagaaaatttggaaaatgcagacaagtatgttaaagcaattaaaaagcagccataacagccacctcaaaaaacattgaatgttaatattttggtgtatttcttttttttttccttttttatgtttaaactttcttccttccaaatttataaaagttatgtaggactttctgcaaaagttctaaatgcacagaatcatgtgatctcaccacttggaagtggccagctgcttactctacagtgtttatctttatttctgtatatttatgtctttacctacatgtacccatgagatcatgctgaaccttttggtttacacctgtgtttttttccccccccaggacaatttatagtagagagttgctcatgtcagctgatctaaatgttcatgatattatttaatggctatagtagcattttcttgtaggattttataatttaggctttacgggctgactttagcgcctgcctgtgtaaggtttgactctaataacagcactagaacttttaaagctgtttttctttatgttattaggccatcccatgtagacaaaaagtgtgtaccctaattaaaaaaattattcttttataattcagtcaaggtgagtaattttcctcaagtttaggatctgatattttgggttagtgctagtttcaggtgctttcaagttttgttttattttatttattgatggattcattgttgatgttgccaatacaaatgggattttcctttctctgtctaaacctctgcttattttgtgttgattaactgctcttattttacttggagtatttgtagttttctctattaatttatttttaccagctgggaagagacatttttaaccacataaatagatttttctttgattcgtggtttttagagtctttaataggagtaggtgttgaatttctttggagtgttctgagcatcagttgattaattaatgaatttttttgagatgttgtctccctttgtcacccaggctgaagtgcggtggtgtgatctcggctcactgcaacctccgtctcccaggttcaagggatcctcatgcctcagcctccctagtagctgggattatagtcgtgcaccgttatgcccagataatcttcgtaattttagtagagatggggtttcaccatattggccaggctggtctcaaactcctggcctggagtgatctacccgcctgaaccttccaaagtactgggattacaggcatgagccactgtgcctggccctgggcattaatttagatgttcattttggtttcagttatttgcatatttcctaataaaaaaattattcttggtaatgttgaattttactcctttatcttgcaatttagaattttcccactggtatgtatgcatttgttttgggtgagaatgtagccttattgcagttttaaacaattgttttttctgtttttaattttaatggatacataatagttggacatactgtgttttgatttcagagttaaaccaaccccataaaattcatttagtaactttctatgagtttatgttttctgcaacattttatgtagctttgggattggttgtttcttaagttcgagagaatttattttaaattatttgtcaagaagactttttagggagataaggctgtaatagaaataaatcctaaaatatttatttcttgcattttgatcattttttgaaccttttcactttttgagtccacatctgtaatttactttcccacaaatttcacaccttcaaagttagtagcgtgtactgttgtgtagtttaaacacctgtgtctctggttgaatctcctttgcatttctaattttattagtttagtttgcttttcttgtcagatttcgtaaactctagcatttttgttttctttgtttttaaagagaactagttcttagattattgaacaattctccttttctgtttccttttttatttttttgagacggaatcttgctctgttgcccaggctggaaggctggagtgcaatgacgtgatcttggctcactgcaacctccacctcctgtgttcaagcgattcttctgcctcagcctcctgagtagctgggattgcaggcacctgccaccacgcccagctaatgtttttatattttcagttagagacggggtttcgccatgttggccaggctgttctcaaactcctgaccttgagtgatctgcctgcctcagcttcccaaagtgctgggattacaggtgtgagccaccacgcctggcctgtttccttttttttttttttttttttgagacagggtcttgctctgttgcccaggctgcagtatagtgctgtgatctcggctcatggcaacctcttcttcctgggttaaagtgattctcctgcttcagcctcctgagtagctgggattacaggtgtgtcccaccacgcctggctgatttttgtatttttagttagagatgggttttcgccatgttgtctaggctggtcttgacctcctgacctcaagtgatcctcctgcctcagccttccaaagtgctgggattacaggtgtaaggcaccatgctgggccctactttcctgttttctaattcagtgtctgtatttatgtgtattggtttttttttttttttttttagatggagtcttgctccgttgcccaggggggagtgtagtggtgtggtctcggctctctgcagcctccgcctcctgggttccagtgattctcctgcctcagccttgggtagctgggattacagacacatgccaccatgcccagctaatttttttatttttagtggagacagggtttcaccgtgttggctaggctggtctcgaactcctgacctcagtgcccaccttggccacccaaaatgctgggattacaggtgtgagccaccttgcccggctgtgtattagtttttatctgttgtaacttacgaaatatgttgttcaagtcctcttatgatcttgttttttatcgcttgagcttccataggctgttaatgaggagttagaatctctttcaggccagttacgtttaacactttgttcatgtatttctaacagttttcaccttctccattttgaagctttgttaagcgtgtaaatatttaaaaagataataccttcaatattgagtaatcatttgttaataaagattaataaagtagtagctttttttttcttctttcctagacaaggtcttgctctatcacctgggttggagtgaagtggcacaattatgactcactgcagccttaaactcctgggctccagtgatcctcctgcctcagcctcccagttagctgggactacaggtgcttgataccatgcctggctaatttttacatttttttgtagaagcaaggtctcgctatgttgctcaggctggtctcaaactcctggcatcaagtgatcctcctgccttggcctcccaaagtgctgggattaaagaagatctttttcgcaatgagtagtttgtgtcattaactgttctctcatgtatattagtatttctaagtcttcttttctttgttcagaatttacttgatatacataccccccacccttttccatcctaacttttatctttagttttccttattattttgaatttaattccctttttttttttttttttttttttttttttttttagagataggctcttgctgtgttgctcaggctggaatgcggtggtacagtgttagctcactgcagcctcaaactcctggtctcaagagatcttcctgcctcaccctccccagtagctggaaccacaggcattgtcaccacacccagctaattttttattttttgtagagatggggtctaactatgttgccttggctggtctctaacttctggccccaagtgatctgtcttggtgtcctaaagtgttggtattacaggcatgagccgatgtgccttgcctagatttaattcttgtaaacagtatgttgttagaatctgtcttattttagtcagaaaccctttgccttgtaaatattgtgcttcagccattttctgctgtcaggattcttgcatatctgatgcctgtgttttgtggctgaatgtattgtgctttcttgtttgtttgtttgtttatttatttatttttgagacaaggtcttgctctgtcacccaggctggagtacagtggtgcagtcatggctcactgcagcttcgacctcctaggctcaagtaatcttcccacttcagccttctgggtagctgggactccaggcacatgtgaccatacccagataatttttgtttttttgtagagaaggagtttcaccatgtcacctaggctattcttgaactttggggtgcaagtagtccacccaccttggccttctgaagtgctgaggttacaggcatgagccaccacacccagccatgctttcttattttaatggtctcttggtacctctcttctacttcccttctgtgttgtctcttaaacatttatagttcacagattttctttttcctttcttttcttttcttttttctcctcccctcccctcctctcctttcccctcccctccccgcttctctctttttctatcttcctttctttcctttttccttttttttttttaatttaaatttaagagacaggtcttactctgtcgcccgggctggagtgcagtggcatgatcaccatttaccgcagccttgaaatatcaggctcaagcgatccaccggcctcagcctcccaaaatgttcagattacaggcatgagccaccatgcctggccaagttcacaaattttattatgctagacctgtttgtagccagcccatatggtgacatcctttttttggtcaagctttgtgtattactgagggtttagtcacagagaacatgctactcaatgctttgtttcactagctcttattcgattcataccaaaccatgaaaatgaaaaaggactgaagaacatggaagaaaaataatgcaaaatggtctgttttccagaaaggaatcaaatacgatattttattagtgagctccgagaacatagtatttcccaatgttggtgttgcagggggttgtcgagagcaggctcgatgctgttgctgtctttgaaggcatttctgctcggagactcagagttgccttctctcttgtgcaatgcgggtttgctaactggttggtctgggatagagcaagcctgatttcttcctcactccagtttgggctttccagctttgaaaaactgttttttccttcttttctcttacacttgaaaaaacgaattctggttcatgtgctttgtcttgttctttgggaatttggctcgtttatttagtcattgttttggcaagcattttttttggggtctaccgtgggccacacaccatgctgagtgcggtgggtagaaatggagaggagccactctgcatcaagcttatattctcgtgggagatcagataagcacatacatagaaccttagttacaggctgagacaagctccgatggaagagcagtacatggtgcctgatatgtggaagaccccacctggccttggggaggggctgggcagtcttctcagaggaagtgaggtctcatagctgagacatgaagaatgatagtggtaaatccactgagggaagcatgagcctgagagggtatgtgtgtctgtgtgttggtgtgtgtctgtgtgtttctttgtgtgtgtctgtgtgtttcttgtgcaaataggcacctcggggatggggcaggtggagggaccagcagtgcgaagaccttgggatggggacaccacgtggagtgtgcaaagtggtggaagggccagggtggctgatggaggccagagcaagaggacaccagaggggaccagcgtggctggggggggccagagcgagaggacaccagaggggaccagggtggctggggggggcagagcgagaggactccagaggggaccagggtggctgggggggggggcgccagagtgagaggactccagaggggaccagggtggctggcagaggccagagtgagaggacaccagaggggagcagggtggctggcagaggccagagtgagaggacaccagaggggaccagggtggctgcggggggggccagagtgagaggactccagaggggaccagggtggctgggggggggggggtgccagagtgagaggactccagaggggaccagggtggctggcagaggccagagtgagaggactccagaggggaccagggtggctggggggggggccagagcgagaggacaccagaggggaccagggtggctgaggggggcagcagagtgagaggactccagaggggaccagggtggctggcagaggccagagtgagaggactccagaggggaccagggtggctggcagaggccagagtgagaggacaccagaggggagcagggtggctggcggggggccagagcgaggcgagaggacaccagaggggaccagggtggctggggggggggggcagagtgagaggacaccagaggggaccagagtggctggcagaggccagagtgagaggactccagaggggaccagggcagagcttgggacttactcctcaggacttgggctgctgttgaatagttttatttggtgaaattctcagatttgcaggtgtcagaaagttctactctggctgtagggtggagggtgaactggaaggggagggaggtttgtaggattgttaggagagagtggagtggagagtgcggaggtgtctagggggcagtgggcaggctagtgatcaggtcagaagggggtggagtagatgaaggtgtcagggcttctgctgagtacagcagcaggctggttaagtgagctcaggagtccagaagaggggctgtggggtggtgggggaggcttctttatcttccatgtctgtcacattctttagccttattttatttaatttgttggtttttttcctagttctagttatcaaagtttttatattgtttgttactacatttacttgcaacctcccctcccagctcccaccccccacccccgattttggcatactttgtatttatcctggcttattcttgtttgaaaggtaaaatttttttttttttgagatggagtctcgctctgttgcccaggctggagtgcagtggtgcgatcttggcttactgcaagctccgcctcccgggttcacgccattctcctgcctcagcctcctgagtggctgggagtacaggtgccgccaccacgcccgactaattttttttttgtatttttagtagagacggggtttcacagcgttagccaggatggtctcgatctcctgacctcgtgatccgccggcctcagcctcccaaagtgctgggattaaaggtgtgagccaccgcgcccggccaataggtaaaatattttttaaaagttttctgtttaacaaagtcattccctccagggaaagattttcctttgatcttctccattttctcttgggttttcacatgttttcattgacttaggatttctcccctgatttattaaactttgtgttatagtaattttagttgttgtcttcaagtcctacgcttgtttgctttttttgagacagtctcactgtgtcgcccaggctggagtgcagtgatgcgatctcagctcactgcaacttccaccttctgggttcaagtgattcttgtgcctcagccttccgagtagctgggattacaggctcccgccaccacacccggctaatttttgtatttttagtagagatgggtttcaccatgttggccaggctggtcttgaactcctgagctcaagtgatctgcccgcttcagcctcccaaagtgctaggattacaggtgtgagccaccatgcccagttttatcatcttcccttagcagcctagagctgtggaacactacaagactgtagggtccattcgagttttatgcttttatttacttatttctccaagtcagtgtttttcatcatttttaaacccatgttctcttttgatgaaggattaatttttattgcctcatttagtttttgaaatttcaaaatgcagcaaaaaggaatgaaagcagtgggctttattctcaccctccctgaccctcctggagagtcattcctacctgtattccatttggtcttatttatttataatatatgctacatgagagcaaggatttttgtctgttttgttcatggctttacaccaagttcccagcacacagtaggtgcacataactctttgttgaagagtggcttggtcacctccagttccagaatgatttgggccctgcccctcattgttcggctctgcaggaagcttcctgggaccagatgctgggcctggctgcaagatcaggtcttccttcctgcagggcacagtccatgtgcatcccagcagccacggcagggctggggaggaactgatgtgggttgcttctctgggcagggcatgggggttccctgcctgtggtgggggaagggggtacgtggctgtggggtggaagggatgtttcttgccagagggagtgggcgtgggaggtgcgctgggtgagcagcctctgaggcaggaagtgctttccaggctggggtgggtttgggcttttttgtcagagctgtgggaagccattaagattttaaagcagggtggtaaagttgggtttttgttagaagagtctgtctgctgctggaggcgagatctgcagggaagagttggctaggtggatgagaaggggtgcagaggggcctttcccccaacatgaggatgtggacagcctggatgtgcttatggaggtgagagatggggcctgaggagagccatgcactgcaggcgggcagggtccatgcttctgctgttgttggtacttttatttgttttgggtgactctgagaattaaatattaataacagtgttgaaggaacatactgtatcattggccatgatgcatgcctcctagaaagcagcgctgtacacagtgacatgatcacagcacccctgcaggactccagatgcacagtttcttctcctcactgagagtgttttggtattgctggcctttccagttctagaaatgtcccctttgagactgacttcatggtggctggtgtcagagtctgtgtcccttgtgaaggaggcagaatcagagctaaattcaatttagcaaagattttctagactaagtaggaagagggctcatcacccgaagtgggcgtgggtgctccccatagccaggctttgtctacaggacagcgggaggcagtcaaggcctgagccctggccaggtccctcggagggcagggagcctggagctaggagagagtggtgatgcagggtggccatttccactcccacagggccctttgcccttcacacccagtgcccactgccctgtctgagacgcctcatgctgtcctggcctgggcctccctggccacctgctggcatggcctctcccatttgtgggggtgccacttcctaactgcctctcctctcacggctctccttccgtgccccctaccttgggcaggatgtgggtgggatatagtttgagtccatctcgggtgctggttttatgaagcacacatttgactccctcagtgggtggtggagtgtgcagacctgagctccctgagctctctcgggtagccctggtcacctctcatgggcagggctgcttgcacagctggagggcaaggcctgagctgctgttcccggagagctagagctcgacaggcctggactgcccaggaggcccgtggaaaggctgatccttcctcagttgttgcagctgagtgtgtgtggcctcctgatgctacatgttcagttgccttttacttcctttatgagggaagttttatgctacgcggtatttccaaagtgtgagctccccagaggaatcagggactctgtctttgaatgtccagggtctgtgtatcctctaccagatagaagacccaaggcagcaggactgggctccttctcttcttttgatctctgaaagtacgggactctgcaaggtaacttcattctttaaggcaagccagagtgtgaatcctagctcagcttcttccaagcagatgactgggggcgagtcacaggacagctcgaagcctccattttctcatctgagaaatggggctagtaacctgccttgtggggtggtttggttgtaaggactaaatgagttaatgaatgtaggcatgatatatgtgtttgtgcctattaacactgtgattataggcacttactgattattcagtgaatgaactgaaagcaataaaccaaattcatttattatatcatttggtatgtggaaaattttcttctagtttggtgtacttaacgtttcatactttctctgtttactgaataataactttaattgaacaaaatcactactaattagtccagatttcactgggcttcagttagtctggctgtattattactactccctgggtcatggcaactgtagctgaggtgaaccttagagaggaaagacaagttttactggaatatgcctgaaatacagagccatttagaagggtcatattctgcccattgttaaaagcgctgtgaactaaggctgggcatggtggctaacacctgtaatcccagtgctttgggaagctgaggcggtggttcaactgaggacaggaattcaagaccagcctgaccaacatgatgaaaccccgtctctactaaaaatataaaaattagacagacatggtggcgggcgcctgtaatcccagctactcaggaggctgaggcacaagaatcacttgaacccgggaggcagaggttgcagtgagctgagatcgcatcatttcattccagcctgggcgacagagtgagactctgtctcaaaaaaaaaaaaaaaaaaaaaaaaaaaagcaagcactataaaccatcgaggggcccctcgtttcttacctaatgaagttcagggtctggtcctcatgtgccctcccagcctggcctctccccagccaagcccagtgcttcttagggagctccctgtgtgtacgggtcacctgctggccctggtctctgggggtctgtttccccaaattctccccaccgaccctgtccgtttcctcctcagggaagccttcctgtttacatggtgctcaggaaactgccatatgcttctgtgggactgtggttctcaaacttggccatgcccgagcaccttttggaactttccccagaagtttgcaagtgggtgctttttcaaagctttccaaaatcttagggtacaaccactttgggacccccttcttgagggtactttgtgtcactcatgtgatgctacattagcacaagctccctagtaatgtgtacttggccacaccttgagctcaaggccatggagtgtcttggcagcttagggtccccagtgctctgccctttggggtgactatgtgtatgaatatgagctggaagaagcaggttctgttgcttctttttgttagcacaacagagagaatgttgactcaccccttccttggcaagccccgctgaagaggtgctcactattgtggacccctctgtgggccaggctcccccttttacaatttcccagctcatgtccggccggcagcttggggacaaggttagcccctgtgctctgtgtgtgcgcttttagcgagtttgccagctggaaaacttgtttatcccagagaatggaggagtcatttgacaagtaaggcattaccctggccacctaatttcaaatcagttggaaaagatgcaagttttagaacttgttattccttatttgaactatcctgtatcacggcaaactgtctactgagtgcctgagggtgtacggggtaggtaagtgtgttccctactctgggagacttctaacagtatataaagaagtagttctagtgccctgtcataagtagagtggaagaaggtacaaagtacagttagagtggtggtggttagccttgggaggggaggtaagcttctctgaggagcggcatgagagctggatgtggggacgggtcccttttgcagagaggactggggaagagtcagggagtcggggacatccaggaaataggtggtaggagtgtctgttcatgtgacacactagcagtgcctgctttccaggtacaagtcctcctgtatggattcatttgttaacttagttcttaaagtgtttgaatcttagtaatgattttaaaggaaatttaaaatagggagaaaatgggctgggtgtgatggctcacacccgtaatcccagcactttgggaggccgaggcaggcggatcacctgaggtcaggagttcaagaccagcctagccaacatggtgaaaccctgtctctactaaaaatacaaaaattagctggatgtggtggtgggcgcctgtaatcccagctactcaggaggctgaggcagggagaattgcttcaacccaggaggtggaggttgcagtgagccaagatcgcaccgttgcactccagcctgggcgacagaacaagactccatctcaaaaataaaaataaaagtaaaatagggagaaaatgttcccacagtagctctgcagttgttttcttttttcatgtttctcttcagacttttttttttttagatggagtctcgctctgttgcccaggccggagtgtagtggcgcgatttaggctcattgcaacctctgcctcccgggttcaagcaattctcctgcctcagcctcctgagtagctgggattataggcgtgtgccaccacacccagctaatttttttgtatttttagtagagacggggtttcaccatgctggccaggccggtctcgaactcctgacctcgtgatccgcccaccttggattcccaaagtgctgggattacaggcgtgagccactgcgcccttcctcccttcagactttttaataggcacacattaaattttacatgtgttatatacatgtataattttgtgttttgtgttacaaagttaaattttgtgttttgtgttacaaaattacattttacatgtgttatatacatgtataattttgtgtttacatgtgttatatacatgtataatttacatgtgttatatacatgtataattttgtattttggctttatttgctgttttatcataagattccccatatcatgagtctctgtaatgatcgttttttatggtggcagatatttcattgtgtagatgtgtcatcactgatcagttaaactttatttgctcactcttgcagcattaggaactgagaatgtttcagtttttcctgttggagataatgctagaatgtgcatttcagatcacaggagggacatttagggaggtgagtttgttctcccctgcagagcagcttccatgctgagccctgtttgcccaggagagggtgcagtttgcccttcaggagctgctttggtttggtcttgggttcctttttgttacctgccctgagagttgagaagacaaaacttcctcctgctttgggtgattctagtttggttctggtttacagctttatttttgagtatttctgtatttcagcttctatttactttacaccattttagatagatcatcatttgaactttcagatatcctaagcctccagaatctctagaggattggcatgtcacataactttaaaaaagcaatatcaagaagaagttgggtttgttgaagggaagtggacagatcaggggactctggcttatatggctaagctggtggaggaagacatgtgagcagacattgggtgaacgtctgctgttccagtggcacatcctggaatgaggttgggtggagggtaggtagagagctgccccaggtatggaaggtggtagaagaagagttgagtacacacttgcatgagggatggggctggtttacaggaatggaaccagcttggaaagaagacagaaggtgagaagtgaatacttgttggtatcatgtaagaacagagtgaagaaaaaggacaggccggcccttggtttatttttaaatttcaggaaaatggattggccaaataatggggatcaaaaataaagggtgtttttattatgagccaagtgaaaattaaatttaagatatgtatgttgttatggtttgattgtgtcctccaaagttcatgtgttggaaactgaagcgccagtgcaacagtattgagaggtagaaactttaagaggtgatcagtgctgggtgcagtggctcacgcctgtaatcccagcactttgggaggccaaggcgggcagatcacctgaggtcgggagtttgagatcagcctgatcaacatggagaaaccctgtctctactaaaaatacaaaattagctgggtgtgttggcacatgcctgtaatcccagctactcaggaggctgaggcaggagaatcacttgaacccaggaggcggaggttgcagtgagccgagattgtgccattgcactccagcctgggcaacaagagtgaaactctgtctaaaaaaaaaaaaaagaaagaaaaaaaaagaggtgatcaggccaggagggctctgctctggggatggattaatgctgttattgtaggggtcagttcctaataaagggatgagttcatctcctcccccttgttctcactgtcacctttgacgcagcatgaagcccctcaccagatgccgcaccatgctcttagactttcgaactatgaggcaaataaacttctgttcatttaaaattatctagtctgtggtattctgttacagcagcgcaaaacagactaagacacatgtctagagggctgcttatgtgtaatagctatataatactgcatatataaagggcagtttatatttaatgctggtagaatatcatgaaggtagtgtatgttagagttaggtttagctactgtattagtttctcatggcttccatagcaaattatcagataacatgaaacagaagaaatgtaattctatcacattcctggaggccagacatctgaaatcatggtgttggcagggctggggtcctaggagagactctgtgacttgcttttcccagctcctggtaattccaggcattccctggcttgtggctgcatcgcttcaagatctgcctctgtctccacatggccttttcttccttcttctgtgtcttctcctctgttttcttaaacagacacctgtccttggatttagggcccactcagataatccaggatgatctcatctcaagatccttaacttgattacatctgcaaagactgtttttctaaataaggtcacattcacaggttccagagattagaacatggacataccttttggaggccatcattcgatgccctatagctacaaataagaatggtgtgaacaggcaaggttttattctttcacaccaaagaaagtagtccttggtgagtatggtcattctgcaaggtcgaccgagcccttccagaatgtgagtcttctagtctaagaggctatgaggtgctagtcaccactgtgtctcctgttgttggacggggagacgaggagaggagaaagtgtgttgcctggtaggagttcataaccaggattcatggccccctcaaagcggtctgtggatatgactatattgtattaaaattggtttccactgtaatcataagtattttatttttggcacttagagaaattctgagaaggagttcataggcctcaccagactgccagaaggggtccatggcacagaacagacgaggagctcttgtatgacttctccaaagtgtgacatggcacttctgcggacatcctcccggttgatctttagttatgtgctcataccgtatagctctcaggatgcttgccctgaaataatcatatcagaataaccatgttatgcagagagaagggtgatttttcatgtctgtatttatgacttccttttccccaagtaatatttttgaatagtttatggtatcaagaagtttgatgaagtatatcataaagaaggtcttccttgttagctgtgtgacctagggcagatacttcatctttctgagactcaattttctcatctgtgaaatgggataatactggactgtatctcaaaggtcattggattggcacagaagtgcgttctgaatgtttcctagtttctaatctccaccaccagtcatctctactagtaggaaagtaatagggtttaacttgctaacatgtaacagttattctgatttataggagtttcaaaggatttcaaacgaggccaactttacagatatattaaaaatagcttttgtagcagaagagtagatatccggaaaaagttatccttaaaagttttcaaggtataatcaatacaaacaggaaaaataaaagttaagggaaaaccaagtataatttaacatataagatgcctttaattggtagctaaataaaaaggaagctatgtaatggatcagagtattgcgtttaaatcttgtcatggcagagcacggtggctcatgcctgtaatcccagcattttgggagaccaaggcaggagaatcacttgaggctaggagtttaagaccagcctgggcagcataacaagatcctgtctctacaaaaaataaaaaaaattatccaggtacggaggcatgcacctgtagtcccagctacttgggaggctgaggcgggaggatcacttgagcccaggagttctaggttgcagtgagctgtgattgcaccactgcactccagcctgggcaacagagagagatcgtgtctcaaaacataaaataaatcttgtccatgtggcattcatatttgttgggtgaatgaaagttccctagtaggcctacctagcgtgaaactgtggctgagtttctcagctgtttctaacagacatcagcccagaggatggttaggactgcttcttgggtgaggaaccgtgatctttatccagatttcatcatcagttttcctttttagcatgtttggatttcagatattttctgggcaaaattcctaagccagttaactttggctcggagagaggaaaaactgtttttttttttttttttcagatgagtctcactctgttgcccaggctggagtgccgtgctgcgctctcagctcactgcaacctccgcctcccgggttcacgcagttctcctgcctcagcctcccaagtagctgggactacaggcatgtaccactacacctggcaaactttgtatttttagtagagacagggtttcaccatgttggccaggctggtctcgaactcctgacctcaggtgatccacccatctcggcctcatgggattacaggcgtgagccactgcgcccatccagagaaactgtatataattggcaaatgtctctgcataaaagactcttcctaattgctgcaactgctggcccaggtctgggacagggagaattgtatttgtgggtcccaaaagtcctcttgagtgtgaagtgtctttgctcttcctgttgggaagccccacgttcgttagcagctcctgccccctgggctcacttctgcaaagcaagcctgcctctatttctgctcaagtgcagtgttccaggagaacctgactgcatgtcccagctctgccagctctcagtggtgggttcttggccacctgtagcttcattctcccatctgccaatgagggtggtcctacctagcacagcaatggtggggcagtcgagcaccgggcagagtaggtgctcagtgaatgaaatactgtaattattaacacatgccatggacagcagtgcaggcctgcgggatcaggtgcagaaggaagttaacccagtgaattccacacctggtaatccacactgtgttctcaggttaaagaagcaggaggaagcaggcattgagtcaaattggtggctgtttgctaagtgtggggttttactgaaggcagcacctgcttctgcagcacagctggtctgaaaagccaggttgctccttgtgagggcttaggggtcggttttaacagtcactccaagcaggcacagggagaagatgctgtcctcttctggcagcctggctggtgagcagtggaaccaattgtggtgtctcttctttagagtttggggtgggagaagacgcagttactcgtctgggctgtttgtttagattatcagtggggtttgcatttgtgaaatctaagccattttcaccttatgattgtatgtgtttgaaaaagtatttgtgttgttaacacttgttatacttgttaatttttatgaacaagtgtagcgtacttgttaattgtctttatttacaaatggcagagaaaacaaagtggatagttgagagactgtcattggattatagtaatttagtaagggaaagagttctttgagaaaagacctggggggaagatacatggatttgattgaattttttcctagggtgcctaggcagtgaatactttttagccatctttactcagtatgcttttaaatgtgtcacggtgtgattgagccaagttccgtctgtctggtttttttttttccttgaaagttacaaaaatggtatcattctctaggaaatcatgttaaaaaaaaatcccacgttcccgtcccagaataacctggtgtttcacagtacatagtggtaggatctttttatttccttgaaacaacttgttatcaaattaagataatttcctgctctgtggtagggagactgctgtttattgacccagtccttcctcctcaccacacaattgaagaacctggtttgaagtgtaaacctaaaaaacatgtgatccccccataccgtttttttttttttttttttttttttttttaagacaggaggaggactgtgggagtggttatcagtagatctgtgcagaagggttggccctgcagactgggtctggtgtagaatgtgccctgtgggagctgcctccaggcctgtggctgggtgtgttaatcagtgctggacttcatacagaaaagtcgatgctgttttcttttctttttcttttttttaaatttggtagagatatgatctcaccatgttgtccaggctggtcaacatgatccaatcctcctgccttggcctcccaaagtgctgggattacaggtgtgagccactgtgcctggccaatgctgttttctttgtagctgaattgttcattggctgcaaagctatagagggtgggtcaagataattagatgtttggaaaatagttaagagggggattggcttccaccccattctttgattttttttctctttgaagaaagagggggggctcaagggacactgaccttggaggcaggagccttggggtttgtcctgtgcccgtcattgaccgggatcgcttccttttctgtaaatcaaggtcatgggcgcagctgacttgccaaggctgttgccagctctgcgctgccttctgaggaacttgatggtttgcttcctgtgaaaacttgatggtttgctttaaggtatcactagataccttggggtgatatctaatcacaccaatgaagagattgggtatttgtttttcccaaatccctaagtgctgatttctccagggcagtacacaacctcttatctttagcactcactttgacttgcataagtttcctggcttggatgataagctatatggtcaccctgcttattcagagaaaggttcatagtgttctttaatgactattctaatacatgaaaaccattttttgtgacttgagacataattgatgtacaataaactgcagtatttaaggtgtacagtttgatagtttttatacacacacactttctctctctctctctcataattacactgaagctgtcaccatagtcaggataacatttccatcaccctgagaatttccttgtaatccttccttctctgcctcttcacaggcaaacatggatggatttgttttctgtcattgtagattactctgcattttaaaaagaatgctatataaattgagtaatgcagcatgtactacttttttttttaatgtctggcttctttcactcagcataatggttttgagatttttcatgttacgaatatcagtagtccattgtatgcatattccagcatttgtctattctattggtgggcatttaggtagtttctagttttgggttattactaataaaactatgaacatttgtatacaagtcttttgtgtggacatattttcatttctcttgggtaaacaccttgaagtggaatcgctggatcatatagtaggtatatgtttaacttcttaagaggctgctaaactgttttctgaagtggtgatccaattttatattcccaccagcagtgtatagagagttccagttgctccacatcctcaccaacacttggtgtgatcagtctttttaattttatgtgtcctaatagttatgtagtgttaccccattgtggctttaatttccatttccctgatgactaatgatgtcaacatcttttcatgtgtttgttggtcatttgtatgtcttttgtgaaatgtgtgctaggacatttatccatttttttaattgggttcttattgagttgtaagacttctttatgtattttggatgtaagtcctttgtctgatacatgtgttgtgaatgtttttctcagtctgtggcttgtgttttctttaatgacacttttagaacagaagtctttctttttggtgaaattcaacttatcagttttttaaatggctcattcttctagtattctatccagaaaacccttgtctacctcggcttgcaaagattttcttctataagttttgtagttttaggttttacagttgggattattattgatgttcttcccccgacccccatatggatattcagtttttgaggcagcgtttattgaagatacattccattcctcatttaattacctttgctgccttttttcaaaagtcaattaaccttttatttttgagtctctttccagattttctattttgttttattgaactatattatgtctgcctttactgaaataattctacactttgttgattactgtagttttataggaagtgttgaaattagagtcatctttgttcttttctaacatagctttattctaagtacttagcattttcatataaattttaatattagtttgtcaatttctataagtgaggcctgctagaattttgtttgagattgtgttaaatctgtagatcaatttggggagaattgctatcttaataacattgaatctttaatgatgttgagttttccagtacattaacacgatctctctctctttatttaggtgctttaaatttatctcagcagtgctttgtagttttcagtgtagatgtctttaacgtcttttgttagattcatttcaatgtaatttatgtttttatttttattaactaaatggaatttataaacattttatatctgtttgctgctaatatataagaatacagtggattttgtgaccttgcaaaatactgcttgtttaattctagtagtcattgtgtagattccctagaaagttctatataaagttgtatcatttgcaaatagggacagctttacttcttcctttctgactcacatgccttttatttatttttcttgcttcattgcaaaggctaagattccagtacagtgttgaataggagtagcgaaggcaggaatccttccaccttttccagtcttaacatgaaacagttcggttttcatcattaaatgtgatgttagctgtaggctttttgtaggtatcctttatcagtttgaggatgttctttacttgatcgctgacagttttaattattaatgggtgttgaattttgtcaaatgcttttctgcatttattgaagtgaacacatggtttttttctcctttatattattaaaagggcaaattaaattggttgattttcaaatttaagacaacttttcattcttgggttaaaccctatttgctcataatatgttttttatttattgttggattcaatttgccattattttgttaaggattgttgcaccaatattcatgaaggtattgatctgtaatttatttctctccctttcttccctcatttcttcctttctgcctttgtcaggttttggtactttaaaaaatagagagtcaggccagatgtggtggctcacgtccgtaatccctgcattttgggaggccgaagcaggtggatcacttgaggctaggagttcaagactggcctggccaacatggtgaaacctcatccctactaaaaatacatatatatgtagtgagtcagtgttaccccgcctctgttttctgataaagtttgtgtaagcttggtgttctttctgaaatatttgctagagtttaccagtgaaatgatgtaggtatgcagtttttttggggtaaagtttttgataataccctgtgattttttttttttaatgttcagattttttgtttcttgtgtctgcagtgacattttctgcattctcttccttttccctctgatttatgtctgttggatggagaagtagaaactttatgagagaagggatatcatggggcttgttgatctgttttcatcccagcgcccccgaaccatgcctggcaccaaatagccacactgtaaatgcctgtggggttaattgatttgttgttgctgtatctctattccttggcacctctgggaagcatttttgtctccccccgtccacatgggaccgtgtcgtcactgtgctgtgacgggagctggctgagtcaggctggcaggctgtggctgccctgcatgccgtgccctcccacggtggctcttcaaattcttggctatgtgcccagcactggtacacagaccctctgagtcagggcttgccaatggaaaaaatattttcaaccttttttggtcttttaaaatattaaaacctatagttggaattacttcttttcatttttacaatgtacttgaagtatcagaggaataaggaaagccattgtaagcttggttagtggaaagggataaaccacctctgagcatccaaataaaattaggaagcgggggttctagatgagggaggacaattccaggaggctcttgaccttgtatatgattccctgactgggaatgtggtctgagatgccctttcctggacagattacaaatgacagcccctggagcaaacacatgaatcagccagggagttaaaaaagaacagggtagtttggactgggcctctctctttcaggacatgactgctgtggctacagactgcattcaggtccccagcatctggaaggagtctgtgcccacttatcctttgcatcctaaggggactgggtctttgtgcaccagcagcagccgtagaggttgggcttgggaatcaggggctcccttatcaaagctgggaaacttagaacaacagctgtgccgctcatggacctgtagtctctcctgttaagcagagtgctgagttcatgtgatagcaaacacagctctgccagaccacagggtcaccaggcaggcactccatccctccctccagggggagaccacggcatgccttggatgaggtgacttggccaactgtcttgtggccccagctcctgacattacaatgtgatgactgtgacacttggaagagaaatgtctcaggtatcgtggtcctgggtcctgtggtacaggaccttgtctctgcggtcctgtacttttgcttcacaattagaagaattgaaagcttcaggttgtttcaggtatgttttttcaagaagtgcaatagtagtgtgtttatagatgttttccttagagttagttttgggggagagaagatgactgcccttccatcctgcaggtggattggctggggaatgaggccatctcttttcagagtgagcagtgaaccatttttgtctgtacactgacctggggctgatttggcatcctgaccttccagtctgagggagttggtaaggggctggaagggcccattctttgtgtgtgtgggtattttttagagacggggtcttgctgtgttgcctgggccggtctggagatcctgagttcaagcaatcctcttgccttggccttccgagtagctgagactacaggtacatgctggacccacactttggactctgtccctgctggcctagttctttgccaagagcaaaacttgagagcaccctcacacaggtaacagttagaccttgtcaggagacatggctgttttcccagacagctgagctttcagactaaagcacagaaaagttggaggacatgggactccttagcccacaaaagaaactctattttaattttccatgtgaaataggagtagggtacgttagggtagggcatcttggttatgagatgcctgcagcaagtgccatcagggtggctgccagctgagtcatctccctcaaagagctttcctggaaccactctccccggtgatgtcagctccttcacctccattgctgtctctagctgcaggggtggttggagacccagtattttagctaggccctgccagaggccattgggatagcaggtcaatggatgaaggaggttgtataggcaaatgggagtaattatctctgatcttgatttttgtaggaaataggcgtagattaaggcatagataaatttgaaaaggcatagatacattaattaattaattagagatgaggtttcactctgtcgccctgtctgaagtgcaatggcgtgatcaaggttcattgcagctttgacctcctgggctcaagtgattcccgcaccttagcctactgagtagctgggaccacaggcaggcaccaccattcccagctaatttataaattttttttgtagaaacagggtctcactgtgttgcccaggctggtcttgaacacctgggctcaagggatcctcctgctttggcctcccaaagcactgattggcaggcatgagctgctgcgcccaaccaggcatagataaatttaaagacaccttttactgtagacaatttggaaaatagagaaaaccagagggaaaagaaaaaaaagaatctctcagtcctaccacttgatgtgtgaacctccagttttcccggctgcttgtgtcctgccttttttaaacacaatacgatgacatcagtatgtccccctttccctcatttatgttttattgtggtagaatactgttttattgtggtagaatacacataacataaaatttagcatcttaaccatttttaagagtacagtataaatatgcccttttataaattacttgtttttccctcctcgtgtggctttgttttctgtgtggtagccattctgtggtttacttaaccactctaagtattgaacacacaaacaggcttgaatcaattcatttgaaaaggtgtggacaagactttgtcctaagggtgacacctggcccagccagcagatgtgattgttctgccttggccaccttgctctgggaaattgtattgcttagtcaggttgaccttcagtgaccaaaaaagtggatggtagtgtcaagggcttcgggtagcttatgaaactctttttccttctcatcttgttactttcctcttgatacttacttgttaactacagtgttactatagacgcctttgggtatatgcagatttaccattagttaatcccagagaaaaatggataaattatgacagcgtggtggctgtcagacttaagaatgccaaagcattcccgtttctctccctccaccccatcccttccagacttactaccagggacctttggtttgcctttccttgtcaccaggactccgaggtctttcagctccttgtttcttctgttcagtagctgaaggatgcaggtactctgccctcctgctgtggtttgtttctctagcgagaagtccagcagcccagctactgaaagccaaggtcactaacgcaggatgcagtcagcccaggaggagcacagccctggacatgaagcttctggtcttacttctcccaccttcctgctacggtgtgcattgcagccgcaagctctgccttggaattgcttactgtgtcttagttcctgtgtgcatttttttattttttatttttttgagacagtcttgctctgtcatccaggctggagtgcagttgtgcgatcacagctcattgcaacctctgcctcctgggttcaactgattctccctcctcagcctcctgagtagctgggactagaggcacccgccaccacgcctggctaatttttgtatttttagtagagatgggatttcaccatgttggccagactggtcttgaactcctgatctcaggtgatttgcccacctcagcctcccagagggctgggattacagtcatgagcccctgcgcctagccccccttgtgcattttttaaaaggtgcagttctgtatttactgtagtgtttatgtggtaaaatttgttcatttaaaaacatttaatattgctgttgttcccttgatgcttggttacaaatttgcataagttctcagtggcctgccccagcttacctattcccatgggacttctttttacttttattgtgcccttttgtagagtatgagggtttttaggaactcaaaaattgcattatggcaaaaatacctggaaggttttcctgatgctaagattctttttaattccccttttaatacaaataacatgtatcattatagataattaagtgcagataacccaaacaaacaaaaaccactcaaaagtcttatcactgagattctagattaaacactattatatagacctgcgattctcaaacatgggtagggataaggcagtgggggaggtgagattggcctgaagaggacatttggggactccacactggtttgtcacagttgtgggtatggagagcaggggtacgtgctgctgacacctagttggtaaagtccagggaagctgctcagtgtccccagaggcacaacagtgttgtgcgacagcctcacaacaaagaattatttggctcaaaatgtcaatagtgctgaggttgagaaaccctgatatggacagatagttatggggcctttttctgtgaatattattaaatacactttagttttacaaaaatttggattatttatacagactagtttatgacctgcttttaaaacttattacttcatgaacatctttctgtgtccatgactatgggcctgtgacataccattgtgtgagcatgttggagcttacttcaccagccccctgtctggagactgaggtgctgccagcgttttgctattgaaaccacatttgtttgtattttgccttctgcatgctggttgactatggccagcccatgttggggcaccagctctacatctggggtgcctttcatgggtaataatattcccttcctgccagaggcccccccgccaaccatggcagtccccaatctctagttttctcacagttgaacataactcaagcttaatgaagtactgttgaaatagtgaataggtaagtaacacaatatttctgtcacgtttcatttttaagtagaactttcactttttgcttcattttactttatgggtttctaaaaaaataaataaattaaaacaacctatcttctggtaggttacatgtgactttaacttcttgccaagttggctttgctccatacctgggcttcctgagttcctggggaggcaggagtgggtcagatggaggatgccttgctctgactgtgctgtgggtggcacctgtcagttgtcatgctggggaccccctccttccccccaaagctgctctgaggctgcaggtgagatgcagcccaggagaggaagtgcatgacagctgtttgggcccacgttcccttttaggttgcagacagggcagcgtgcagagctggtgggctgggcggggtctgacacagtgctgtgcggagctcacccggacctgggcactcaggctctttctatatggggaactccaagagcttgtttgtgtggtggtgtctatttttgtgttttgtgtggtgctctgtgaggaagtctgttgtctacgcacatcccagctgctttgaatggtctgtctctgggggcttccaggtagggaattgtgtacggggaatccaggattcgggcagcatcggaacagcaggatgtgagtaacaggaagtgacagaaatgacccagggcgccagatgcttattctcggccacctttccaagcgctgcagcccaggagctatatttagcagagtgtttccgagtgcctcatcctgcccccagcaccgtccctttgcccctcttttggttggtggctgattgcacggtactgatttgctgctccagcgttcctgctctacttcgtaatctgtaggctcttgcccattgactttaacacccagtttttgtttgtgctgggtcacttcaattttgatacacgtggagcagctggaaactgttctgagcaggaagggcagcaggtaagagccccaggggacagtgtgccatcatactgggaggctgttgggtggtgagttcaaggtcagggtttggaattaagcggaaggaattgagcttccttgtaagatgctccagagggttgcttcttggcttgtatgtcttagaaatggaaggctggaatttttaaggtataggctttgtggtgtgactttactcatgtgctagaaacattctgtggttctcacctggccagacagaaagctgcaggtggaagaggcttgtgtgtggtgaattcctacagtctgagctttgtcacgggaaaatttccctccagtcccccaaagcaagcactacagagcccagatttgttctgctttgggtgtgggtggattttcaccttgtctgtcgacggtgcaggacctgtccctgtgtgctttgaggtttctagggtgtgatgttggtttgtggtttgtggaggggtgtgtgttgggagggaaggtgtttttgctgttctcctctaaaagctcccttctgagtggtcccgccaggacctccctttcctcccttcatgaagcatccaccttgttttcagacactcgagctatttgggattcaggaattgactctgggatgagaaatttgagagacaaattaggaacagttgtgtctgccatgagacgcgtggcagtcggcaggggcctggtggggtgtataaaagccctgggaaccctgcataaaggggttgggatggtaaaggagtgaattccaggctcaggcgctcaggagattcccctcccccagttccctcagcagagtctggctactggcatggtttcaggctgacctgttaaccttccgtatggctaaactacaaatatagggcatggctatattgtgtgtgtctctagttctggcttgggcatgttagcatatttttgtgccaaaacatttaaaacattcaaaaagtaacacatgaacccagctatgactgcttccagcctgagaaataaacataatagatataacagaggcacttggaattctctttcctatcctcgtttcttcctgctcccccttccctgggggcatcctaactttggtgtttgtcatttgttttcatgtttatatacttttttgataagtgtgtgtaggcataaacagtatatagcattgttgaactggttctgaaatgtcgaataaatgttatcagactggacagccacagcattacgcttcctggatttatccctgtggctacatctagctttagttaaatggttcaaggtttaatacaactgattcctgattcctggagttaaatcagaatttctggggaacgaggcatgaaccgcagagctcctgacaggcgcggcctgagttgaggcccacgatgctggttttcgtggcctctgtagtgttccagtacctaagacgtcctgttgtggacgtacactttcccagattccctgtgatcagtagtgctgctgtgaatatgcttatcttcgtcttcttggcacatgggcaagagtttctctagaatgtgtttctaaggatagaattgccaggtgtgtgcatcttcagcttgactggtgatcgtcaaattacctccagaactatcagcagcagtggtcacgtatgagtgatctcatttctatagtgtctttaagtttttcttttttaacataccaaactgagggcaagatgaagacctcatgagtgagataagacattggacattgctgagactttaatcgacaccgtgccctcagcatgtccacacggacctgctggccctgccgccaccccagctgtaaagcttgcttccacccacagtgtccccttcctgggatgggagcagcacccagccagctgctcggaggtcactgtggactcctctctgtctcaccctgtcccgtctgctgtcctcagagcacatccagagcctgcccactctcctcaccatcatctcgtgatggggttactgaggagcctcccaaaaggtttcctgccttctttcctgcatcttactgtcagctttcaataaagcaaccagaatgatgctttcaaaacttgagcttgcatggcttcttattttacgtggagtaaaagccaaagttcttacacctgcatggccctctgtggtcctgatgcttgcaggttggcccctggcccccttcctgatgccagccccagccacgcaccacgcgcctgcttctgctcagcccttcccacctccttccttgcttccttccagtctctggctccttcctcgcctcctccccgtttttgctgtggagtcccctggcccccagacctctcttttctggtctcccgtttttccatagggcttgtcaccagctactactctccatgctgtgtaattcacttctttaataagtctttaatttactgcctgcattcaaatgtaacttccgcaggagcaggaatcttttctgtttgctcaagtgaaagactgcctgaatttatttctgaggaagaaagaaagaatttggagcccaatgatgaagatagcacaggagagaggaggtgaagttgagggagcagtttctgacttgggaggttggggggatgggacaattactggtctctgggaggcagtggcagaaggaccttgaggccccctaagtgtgtagtaggacccccgaggggcatggccagtgggctgtggggctgcagaggcagcttcttttggggccttgtcttggcaccatctcggccactcccagagcatacattggtattgccgtagtgggtgctgggctggcccgccccacccaggaagtgcactactgtttgagggcaggagcctgcgattctgacatcctctcttcatggctgagctcctcaggttacatagctccactgattcctcaagcactgttgtgtttagaaatgaaaccttccatttccagggccctgccttgtgcaggctcaagtacccaggccacgtgtcagagcccatagcaaaatgagcagctcaaccggagggcgtggtccatgacactcctgcgtgtgcttggactcaggcgcagggacaggcggggcagctggcatttctacccacccctcctgacatagaggacctggtccttttctttgagaatgtgtaccaaaggtgtgtcggctgtgtccacataatattttcttggcgtcagatgtttcatgggttgcactaactacaaatacaggactttagataagattacacttttaacttgcgctgcccacatacgcccttgtccttaagaaacacagcattgttctggagttactccttggttttcccagtttaaacttaaatattgttgatggtggttacttatttttaattaaagcttttattttgagattctttgtaccctttacccagttgcatgcagtggtaacctcttgcacaactccagtacaatgtcacacccaggatactaacctcgttacagtggagatgggtagcctccaagccgcagagattttccttgtgcccttttacagcctcacacatgtccctctgtaacccctggcaaacactcatctggtctccatttctataatttggtcttttcaagatgtgatataaatggaatcttatagtatgtaacctttggggttggatttttcactcagcgtaattccctggagcctcattgaggttgatgagtcttatcagtggttgttcctttttattactgagtagtattccacgggtgtaccacagtttgttaatcatttaccccctgaagggcatccgaatagtttccagcttttggtgatcatgaataaagctgctgtaaacattcctgggtaggtttcggtgcaaacatgaatctccatttctctgggataaatgctgaagagtgtaattgctgggtcatatgctagtcacatgcttggttttttaagaaactgccaaaccgttttgcagagtggccgtaatgttttacatcccacccaacagtaagatccactttctccatattctctccagcaggtggtgttggcactagtttctgttgtagccatcgtgataggtgcgtagggctctctggttgtggtttcagtgtgtttctctgatggctaaggatgttgagtatcttctgtgtgcttatttgccgcttgcatatcctcttgtgctgtcgggggtgaggactcatttccaggtggtataggagacatcccggctctcagcttggcctcctctggatactctgttaggtgagtgctggagtgcctagctgcggcctgggagtggggtgggcatggttttttcttgtggcgctggctggagtaaggtgggtgttactgccgttgtcagtttctgtcttgtctgactgcccccttcctggatccttggcctggaagagcaggcttttgttggggctttccacccacccccccagtatccatcactgttttcggctgctgcttctttagctccaagtctagggtataccaggtaaaaagaaaacccagagggccaccacagtgtcatccctttggacaagacccttgtcaggctgccatcttctctctacctttcagggtctttttgtgttgattttctgatgcccatggttttcagttctcagtgagaggagtggggaaaagtacctccctgtcatctgaatttggacccgtgaaaagtgaagagggggtccattcagaatgttgtgcctctacccatccctgctcgctcgtcatgaccgttggaccgttgtggtccccgggcctcacattaattactcttaggcccttttggtttggcctgtggtttcagcgtgacacagtttgctggactttgatcttttttgtcatttaaagtgtcatttatgaatgagatccacgtccagatccctgcatgtccaaattcatggttagaaatggttggacaggacatagccatttgggtgctgtgattcagcctgatgtcaatcagtgaactgcctttgtcattatcctccagatcttatttctccaccttctattttgaactcttgggaaacctggtcagagtgggagggacaactagtcagatgacttaatgagatgttggtatcgtccttgtgctgatcctccaagccagtcaccctgccaaaacggaaatgaaatgtgccagacaccgcttgtactgagtgagcttgggagagctcgtggtgagtgccagttgcttccctgcctccggcccactggccctggtgtgaggcaccacccagatgaggagaggctgcgggatggaggtccagggctccgcctggagcccccctgcctggtgtcctggccacatcagctcatttgctgtgggactgtgagcaggcccctcagccgggttcgtcaggttgtggagaagctgaatggagcagataacctggaaaacacgcggtggattgccgagaccttctttgtgcctcgcccatattagccaaactgtcccttgttctatcagctgccatgtgtgtgtaagccagagtccaccctcttttccatttgagaaatcacgtctgcatgtctccagtatgtctcctttttcaccatgatttctcagagatcactccctgcggtttaataaccccctgggctaattcttcccaggacatgggaggacattttgtctggcttggcaactcatttagagtagcaaggtattttctcatttctcttggaaaatcatgtacttgaatcaagaatagaagccaaaattgttctttcaaatagaattttaaagcttttttttttaatccttaacatataaacgtaagactttatttttatttatttatttatttttaagatggagtcacaccctgtcgcccaggctggagtgcagtggcgtaatcttggctcactgcaaattccacctgccgggttcacgccattctcctgcctcagcctcctgagtagctgggaccacaggcgcccgccaccacgcctggctaatttttttgtatttttaatagagacagggtttcactgtgttagccaggatggtctcgatctcctgacctcgtgatttgcccgcctcagcctcccaaagtgctgggattacaggtgtgagccactgtgcccggccgactttattcttttttaatagctcatttttggattggcaacacatgcaagtggtacagaaatcttaaggctaaaaagatataaagtgtttcccagccactcagaggtcctctcagttagaggtgactaatattagtgttttctctgtacccatactcttcctgcaattggcttttatctattaacagtgtgtcttagaggttgttccatataagaacatgtagagtagcttcaggggttttagtggctgcatagttttctgttatatgaatgtactgtcattactgtagccagtctctaccagccttatattgatcactatttgtttggtttcaaatattttgtctttatagtgaatgccgccacaaataaccttgtatatacagtatgtgatttctcatgaagatacaggagaggataaatttatagaagcatggttgttgagacacaggtgtatattttcaagtctgacagattttaccaaatggtttccatagaggttgtattaatttttgccccagtgtatgagaatcagtagaccatattataaaacatttgatctctgtgaatctggtaggttaaaaaatgggatctcctaattttaacttgcatttgccttataagacagcgttttttcataaacgttgaaaatccatttctaacactgttttaacatagtgctgccagactctcatattcatgcttcatatttcatattcatattcatgtttccacctttctctccctgtctcttgtacagttattttctaaccagattttatgcaggagtctgggcagctctgcacacttttcttttgagttatgtggttatgtgtttttgagaaatcccaagttctgtatcctttttgactgaggtgcagcattcacatggaggagtgtactcattacagacgcacagcttgatgcatgttcccgaccacggagaacactgcagcccccggaatccctcctgtgtgcccctcctgtcaaagcagctgctaggagaagctagcatctaataccatagattagttatgtctgtttttttaactttatgtaatgcataaggaaattacacagagtatatgtcgtcttgtgtcaggcttatttctttcgctgttgtaagattcattacattattgcttgtctcccaatgtatgagtatactacagtgtattcactgtaggcctgtttagagtagtgatgctatgaacattctcgtatgctttgatgaggaaggtatgcgtttgcatttctgtgggatgcgtgggtggaattgctgagtcacagggtatatacaagttcagctgttttctgaagtagttgcaccaaattgcactgtcaccagcacttgatactgtctgttacagctcagccattgtgagagatgcatcaccctgtagctttaatttgtacttccctgatgactaatcaaattgagcaccgggtcatgtgctttattggccatttgtgaaatagctattcaagtctttcgtccattttactattagtttgtctgctcttactgatttttaagttctgttaccctcaagagaattccagcaggtgtgtaaaaattcacatctgtctatggctgttctagcctgcctcaggattctgtgagaaatgcatccaccattttatccactcctcctctgtgacatcacgtttctttctccagtcatcaagcatcaagatctgaggatattttctctctccagtgtgtaggtttccatgcagtcacctctgatgcagttctgctccttctcttggtgggacgtcctgcagcctggccttttgaatccctgggatgtcattcatttgtcctgttgagttcagtttattgccctgctttttttttttttttttttttgagacagggtctcactctgtcacccaggctggagtgcagtggtgcaatcttggctcactgcaacctccgcctcccaggttcaagtgatcctcccaactcagcctcccaagtagctgggattacaggtacatgccaccacgtccagctattttttgtatttttagttagagatggagttttaccatgttggccaggctggtctcgaactcctaacctcaagtgatctacctgcctcggcctcccaaagtgctgagattataggcgtaagccactgcgcccagccttattgccctgcttctgatttgcaattatcttttaagttgattcaggggtgtgaactgtttcttatttaatacatttgcttgaaaaatatgagccatcttttagtctccaaagacttttctttgtgaaggctggattttggagatagtttcagcttttttacaccattccttggttgccagtagttatgatactggctgcagtccagacatagggatgctcttagtattccttagagcatctccctgcaccctgccacctgccctggtgggcagggtgagcagccaggaaggcatagcctgagggcctgtatctagcccctgctttctcgcctgggtccttcctacccatgctgtctcccaaatcaagggattgaataggaagtgctgctcagaacatcccccagaatcagcctcccgaagagactcaccctcccctaccagaggttgggctgtggctggtgttaggggaacaggagtaggaggggagccagaggaggaggaggtgggcccttgcctaaggggtgcctgctggttggtgtgggggctggagctcgccaggaggggtgtgctgagaagatggaggcatggcatggaagtgtgagtcatggcaaatctcctgtgtgcagctggggaccgacatagagaaggcaggcccagttgtgtcccctctgtgggcagctaagaaggatggattctgacttatttggtgggactctcctgtgacatttcttgtggtttgggagagtggaccactgataccagagcagtcttaagaaagatgctcacatgggaaaggggtctcagcagtgtcaaatgatgacatcaaagctgagggcttcgaccccaaggtagcaccgatagtgacagtgcccagaacattatcaggttgcaccaactggcacctcacaacaacaaggctaggatgcgacactgctcttaatagctccggttttcagatggggcagtggaggcacagggcggagaagcacctgctctaagttacacagctagcaagggcttcagactcagggaatgtgccaggccctgtgcacatttggtcctgttcagtcccaccacagccctgcaggttgcttctagcatcacttttcttgacgagaagcaaagagggtctgcccccatttcgcaaatttatcagtggccaggtaggattcagatctgggtctctctcaggcttcttcacaacagaacaggcacaaataagaggtttttttttgttgttgttgttgttgttctgttttttccttagaagccaaaacccaggttctctgacatttatctgttgctcagtgtttattgtctgcaaacaacagcacaggtgaaggcaatgatgccattggtcacttgtatcttaactcactgtctttaaacctaatgcttttgtctataatttgctgtctagtagtgcccaatacccacaaagcaattctagtacaccctctccttcagtgtgtgggtcaggtgggcccaaagatccatcttctcaaacgctgaggctgagttctggagcaaagttggcacttcagctcgtaaaggctgccgtgggagtagtagactcaggacctaaaacatctccttgttgtcttctataaatatcctgttgcatgactcctaatataatccccgagttatgcacagtaaggtatattatctttctcttactatatttactatgctgacaaaagtgttcaaatattaaaactcacccagggtgaacagttcgggacgtgtgctcagacttgataggtagacagggacggtgccgatgacatgcacccactcggccttggcagctcccagtctcccatgaccgtccctcagtggctgtccagagactccctgagtcccactctcagggcccactttgtcgtcttcatggctgagtcagtgtgggaaatagttatctgcctgcctctccacgctgtgagttctgtgaggggaggaactttgctcaccatgttgttagaatccccagtctagaggagacacctagccagcatctgctgagccggggggtgtcctctggagggagaggggctgtttgtggtgctctcaagcttgaacagcagcagggcagaaggcagacggcccctccgggcctgcctttgccgtctctccttcgccctcactctctcccagctctgctgcttcccacgcccagcccggccccaggtgttcttctcccaccaacccaggatatgtggaagaagaagcgaaccatgcagtggcgacccagttccatttatcccctctgcggtgaaacttagtcactggagaatctccctgtaaagcactttctatggtttctgagccagaaacatggtcatttaataatttaaattgggtattcctaaattgggtcttcttaatgtaaattaaagctatgagatgtgccgaaatctaaaagttaaataacatattttgtttttgaatccatggggaagcaagcattttcctaacactgttggtgagaatgcaaaatggtacaacccctgtgggaataatttggcaatagctagcaaaattacatgtgcatttactctttgtcagggcaattctacttctaggaatttaccccagagatacactggtaaaaacaggaaaagatgcttgtaaagataattcacggcaacactatgagaaatcgcagaagaattttaaacagcacaaaattcccatccatagggcgctggctgagtcctatacagtggagtactgtgccactgttgaaagaatgaggaagccctggatattgctaaggagtgatggccgggatatgtaattaaatggaaaggcaaaggtggagaaaagtgtccatgctactgttgacaaaagggacaatgtgatatacatgtttgcatgtatcttaaaaatggaaggagaaaccttactttctctctctcttttttggtaaagcagcctatgggaaccaagataggggagagatataaaagctagatttctaaatctaccttgtttgtagatttgactttggaactccatcgctatattataatcattataaaacaaaattaagtaaaaggttatgacccttgaaaattttgatatacactatcaattttttctctaaaaagtttataccctgtttacctcctgtcagtacttgaggagaactctttttcccccacatgtttgtcagtactggatagtcatcttttaaaactttgccaatcccatgggcaaaaaatagattgctattttcatttgcattctctgatgactagagtgattaagcagctttttacttgcttattatccattttgtatttcttctgtgaggaagtccaagctagagcaatcaaacaacaacaaaaaaagaaataaagggtatccaaattggaaaggaagaagtcagattatccttgtttgcagatgatgtgatcttatatttggaaaagcctaaagaccccaccaaaaaaactattaaaactgataaattcagtagagttgcaggatccaaaatcaacatgcaaaactcagtagcatttctgtatgtaccaacagtgcacaatctgcaaaagaaatcaagaaagtaatcccatttacagtagttgcaaataaaataaaatacctaagaattaactgaagaagtgagagatttctacaatgaatactacaaaacattgatgcaagaaatggaagagaacacacaaaaaatggaaagatactccacgttcatggactggaagaatcaacattgtgaaaatgttcgtattacccaaagcagtctacagattcaatgcaattcctattaaaataccaatgacattcttcacagaaatggaaaaaataattctaaaatttatatggatccagaatagccaaaagacccagaatagccaaaattctcctgatgaaaaattggaggaatcacattttctgacttcacattatactacagagctatactaacccaaacggcgtggtactggcataaaaacagacacagaacaatggaacagaatagagagcccagaaataaattcatacatccacagtgaacacatttttgacaaacgtaccaagaacatatactgaggaaaggacagtctcttcaataaatggtgctgggaaaactggttatccatatgcagaagaatgaaactagactcccatttattgccatatgcaaatatcaaatcaaaatggattaaagactttaagacctcaaactatgaaactgtgaaaacactggggaaactttctaggacgttggactgggcaaaggtttcttgagtaattcccacaagcacaggcaaccaaagcaaaaagtggacaaatggttaaagctcctgcattagcaatgcaggaaaaaagcagtgaaaaaaagctcctgtttttaacaagttaaaaagttcctgcacagcaaaggaaacagtcaacaaagtgaggagacagcctacagaatgggagaaaatatttgcaaactgccaggcgtggtggctcatgcctgtaatcccagcactttgggaggccaaggtgggcggatcacgaggtcaggagatcgtgaccatcctggctaacacggtgaaacctcgtctctattaaaaatacaaaaaattagccaggcgtggttgctcacgcctgtaatcccagcactttgggaggccaaggtgggcggatcatgaggtcaggagattgtgaccctcctggctaacatggtgaaacctcgtctctactaaaaatacaaaaaattagccgggcgtggttgctcacgcctgtaatcccagcactttggaaggccaaggtgggcagatcatgaggtcaggagatcgtgaccatcctggctaacacagtgaaacctcgtctctactaaaaatacaaaaaattagctgggtgtggtggcgggcgcctgtagtcccagctactcgggaggctgaggcaggagaatggcatgaacccaagaggcggagtttgcagtgagcggagattgcgccactgcacaccagcctgggggacagagtgaggctccgtctcaaaaaaacaaaacaaaacaaaacaaaaattgaaaactattcctctgacaagggattataaccagaataaatcgagagctcaaataattcaaaaggggaaaaatctaatcatccagttaaaaaataggaaaagtagacatttctcaaaagaagacatacatatggcaagtaggtatatgaaaaagtgctcaatatcattgatcatcagagaaatgcaaataaaaattacaatgagataatgtcttaccccagttacaatgacttttatccaaaagacaggcaataacaaatgctggcgaggatgtggagaaaagggaaccgtacactgctggtaggattgtaaattagcacagccaccatggagaacagtttggaggttcctcaaaaaagtcaaaatacaattaccgtgtgatccagcaatcccactgctaggtatataccaaagagaaaggaaatcagtgtatcgaagagatgtctgcactcatgtgattatagcagcactattcacaatagccaagatttggaagcaacctaagtgttcatcaacagacacatggataaagaaaatgtacatatacacatggagtactatttagccatgaaaaagaatgagatcctgtcatttgccacaacatggatggaacaggaggacccttaatgttaagtgaagtaagccaagcacagaaagacaaacttcacatgttcttatttgtgggagctaataaaaaaaaaaagaaaacagttgaactaatggagataggcagtagattgatggttaccagaggctgggaagggtagtggggctggggggatggttaataggtacaaaaatgtagttagaataaacgagatctagtatttgatagcacaacggggtgacaacagttaataatttgctgtacatttaaaaataactcagagtatacttggattgtttataacacagagaaaggataaatccttgaggcaatggataccccatttactctgtgattattctgtgcctgtattagagtgtctcatatgccccataaatacatatacctaccatgtacccacaaaaaaaattaaaaagaacgttgatgtatttcttttgtgaaatgcaagttcatagccttttttatatcaggaagattttttttctactgattgataagaaccctttatatattatggatatcattttcatttgttgattattaccaggtcacagctttatttccagtcaagttgttcaggtcctgcatagtctgatattgaggttttctacaagaacatttatatgtgatacatgctcatggtattccagacttacagctgagcagacttccctcaactgttcaaatgctggccatcactgtgggctccctgaagcagtagcaactgtgtcttccactgttcggaaaacaacagttgttacttctttttttatttccttagggtttactactgtgtctaagtagcaagcaattataaatgtccacttaaattgattgctgatgaatatataaaaactaaatttcactgtctttttggtttgagatcattcttatttttaatttttagtgatccttgataaccatttttgttttcggttcagtgtgaatacctgaatgaaatagtaatttttatgtctgtgtgaggtcggttttaagaaagcgttcatagctatcagcacttgccttttgttcatggatctgttgaacctgtttctttctctaggtcataactccatgcaggaagctcatcttgtgtgctgataacagaaaagaaatggaagattggattgcagcattaaagactgtgcagaacagggagcactttgaggttaaaaaagaaaatacccttctccaaatgcctcctgttgcctccctcaccccagtgtctgctgtctgagtgtctcccacgtgcggacccacagtctggagctcacgttcttagcatgttctttatacaattaaagcttattgcttgtcctctcagcagacctgtcctttataaaccttcctcctctcctctcttggatactttgtttaatcttgtccaagttactgcatttaacaatttaaaagagaagtcttatctttgccctcttggtttcgttcttccagcccacccagtacagcatggaccacttctcagggatgcacaattggtacgcctgttcccacgcgaggccgacctactgcaatgtgtgccgtgaggctctgtctggggtcacgtcgcacgggctgtcctgcgagggtacggatgtgcgtttgttattctgtcaggaaaggtggcctggcattttacttgataaagccttggaaatccaaacccagtcaccataaataagccgttgtcacccatgtggtcagtcaagggcacagcgatttctgtgatgccattcttgtttattttacctgccgaagagtccttgataaatcattttttatagtgctcagagtgaaaagggaagtggtgggtggcaaaaggagaaatgggaaatctagagcacacagagggaaaggcactgaaggaacagtggtcggcccctgtgtctcacactctgcagccggggaaacggggctgtgcatatatggactgaaagtgtgttacagacttagaggtcagggctgcagggtttgggcaagggcattcagtctggtggcaaagcagtgggctagagcagggcttgttagctatagcctggaccacaccctgcctctgcctgtttttgtacagctcccacgcttcagactggcttttaaatttttaaatgattggaaaaaatcaaaagaagaatcatattttgtgacacatgaaaattacatgaaattcaaatttgtgcccgtaaaaaaacattgtctctggctgcttttgtgctacatgacagagttgattagtggtgacggaagctggttgcgacctgcagagtctccactgctcactctctggcctgttacagaaagcttactgatccccagctttccctgccgctgccggtcccaccgccatcagcctctaagcgtatcacagtagttcacttataaaatgggagtgccattggttccttccttgacttttctggagctggacggttctcacaacactgctcagcatgggaagctcttggcacagacacagcttgtaggctcatgtgccccttctctcacagtgtgcaaatttaaggcccacaagcgctgtgctgtgcgtgcaaccaataactgcaagtggaccacactggcctcgatcgggaaggacatcattgaagatgcagatggggtatgttaagaaataccacctgtggggccctgagccagggtcccccacctgcacggccccatgcaagcctcctccctgccctccctgccactgtttcatttgagatggtcacactggcattgggtggcacagtggaaattatatgcggtctccgtgtggttgtcgcacccccgagctccatcctgtccctgtgagtcttgtttgcacctccgacaggtgctatgggtagatggtacttcacaggccctgccatcccttccctcactggccatcagggaaggagcttgttctgggaagaatgccttggctgagttcacaacgagcatttcctggctgccctggacgtggaaccttgggagcgtccctagtgcgtgcctctgtttggttgcagattgcaatgccccaccagtggttggaaggaaacctacctgtgagcgccaagtgcactgtgtgcgacaagacctgtggcagtgtgctgcgcctgcaggactggcgctgcctctggtgcaaggccatggtgagtgtgggccctgcgcccgggctggaggggagggcttgctccctaccgtgcccatgcgggccttgcggctccgcatgatctgctggatcctggtaaattaatcccagaggcccctccggctgagagtgggtttttgaactgttgggtcattctccttcttagctatgttttggggtatttcttccttttgcatttattcctgtctttagacatatgcagatgtgtattgttatgacagatgtcaccctgcatcatgcggcactgtagccgggttgtgaggggtcacctgggacaattgagctggccgcctctgtggtgtggaagcaggaaagctgtagaggccatttggagcggcgttggctctgggcagtgttgacagtgagcacagccatgtggaaggggtgcagcccagtggcctcctgccaggtcctgggtctcatcgttgctctgggtggtgagatgtgcttccagggagagactcagggagcctccatgtacttgcttctgggttggtcattgtgaagtggctgctgcagtcacttgcctagcacatctggctgccaggaggaagccaagacacaggggacacatagaggcacatggccccaggagccctcaccctcgtcctgaaagtttgaggtagctgtggtcgaagggccagaaggttgggtacaggactgtagctcacacggtgtgaagcatgactggctcctgccgggtatttccgtgttatgccttctcaagtgcaaagccagggcccagggcccccgatgatagcaggccggcccagggcccctgatggtagcaggccagcccagctctgaaatcacctgcctcccccgaggccagctcatcagctacagggcaggaggatttctggtgtgtgtgaaggatgccagtgacccttggtgacgcggggactcttgtttcaggttcacacatcgtgtaaagaatccttgctgaccaagtgcccacttggcctgtgcaaagtgtcagtcatcccacccacggctctcaacagcatcgactccgatggtgggtaccacacatgcttatccttctcatgcacgcccacacgcttccttctccacgcactttctcttctccagctctggagttggttatcttggtgagatgtcagcaagaggtcaggcacagctgttgggggtgctggaggagttgcacagagcggcacacggcgccctgatgctgcggcattgcccttagatgggccagagacccaagcctggcacttgacgtggaggtgatgctgttgagtggcacccaggcttagacaggcctgagacccgagcctggcacttgacgtggaggtgatgctgttgagtgcaacccaggtctggggccttctccgtcatgagccattgaagctgtgccccatctctgcctagcacatgctggcacactggcttgcagctgctctcatgtctggctgggacatggtggcacctgttgacaagtactggtggaaagggggatgtggggtacatggctcagaggagatcaagaagagaagacagcagaaaggtggcatttggacagcttgtgaatgtggaggtcagatggatggggctcccggcctcacacatggagaccggctgtggggaactgttcactgacctcctcctgacttacaggtgtgcatgtgtcaggtgtgtgtcctttgggggggtctgctgctgctgattccatcagtggtgccctcagcgtcttccgtggcctatatattttcttctgttcgttcttgcgtccagggttctggaaggccagctgtcctccttcttgcacaagcccactgttggtcttcgtcaattcaaaaagtggggacaaccagggtgtgaagttcctcagaagattcaaacagctactaaaccccgcccaggtcttcgacctcatgaacggaggcccacacctcgggtaggaagcttgtaaaatatatctttcttggagttttaaaaattgtgtagatagtgtgtgcttgttaaaaaaaaaaagttcaaagacacaaagctttaaataggaaagaaaagttgaactgcttccttcccaaattgcacttgcagaggtgcccactcttaatagaggtgcatggccttccaactttgaacacagtgcgcgtgtgcacacacgtacatacatccatgtacacacacccatgcacgtgcatcttttgagccaatcaggattcttctttacctgccgttgcacaaatgccttctgtatgtgtctgcatacaacgttgtgggtgtattttctttcattttataattttttatttatctgtctatctatcatctatctatctatctatctatctatctatctatctatctatctatctatctatctatctgtgggtgtattttcctggcgtgcctcgttctttgtaacagctgcctaacattgaggaagaagctgtcctgcagcgaggccaggaggagtgtttgctgagaggcacaggaggccgctcggtgtgcaggtgctgcaaggcaggaacacgtaagggcggcgttgggccagagcgatttccactgtgcatcagcagcacagagattagactgttcctctgcttgctggagagccatgtgtgttctttgtagttttttacttttcataagtttgtagaaaacatttgcctttgtgaattttgccatttgaatgaatttcttcctctggaagcatcagttccaggtcggagctctaagaggacttgctggcactgccggagatgtccaggatacccgtagtgggaagtgcctgcagagcctgtggtctggcctgtatttctctgggaggagtcagtggggtctgtgtattaggagccaggggctactctgatgtgaacctcggccagctccctgcgtgtccttggcgtacatgccagggtaagaggaacatgctgctcgtcgttggtcctgtgggtgtcttctgtgttgctcatccccactcacagccaggcgcagtcggagagcagtcacagatggcagcattccagcctgcttccgcaaaggcagtactcccacattttctgtagaaagacttcttatctgaatggtggaggattgcattcactagtaggctgatcaagatattttaattttaattttactgttttttgagacaagagtcttgctaggttacccaggctgagtacactggtgcaatcctggctcacagcagcctcaacctcctgggctcaaaccaccctcctgccttagcctcctgagtagctgggactacaggtgtgtaccactatgcccagctaattttttttttttatgttttgttgagcctcacaaaacttttaaaatgttttgtagagtggtctcactgtgttgtccaggttggtttcaaactcctggagccaaatgatcctcttgcctcagcctctcaagagtgttggattacactgcctggcaaagaaataattttagttaaaaagtggggaaagtggagatataatacgtctgttatcacaatgcaccaagcaggctgaggttgttattaaacatggtaccaggggtgttggaggaatgctgtgaaatggctgtgggcagggcaggttacacagctgaactcgagaataacgaaatattcattttggtgtgcaagcaaaaccccatgtttcgtagtgggagttaagtatgagatgggatgatttaggaagcccccacagcggcgtaaggggagttgagtcgtcatttaccatttctggaagcagctcatctcacacagctcacagcagaatctggagctactgcttcatgttccagttcctggccttgacctgtcacctcttctcccgagagcagggggccttacaggtgtcagtgttctgtgtggagcctgggcttggtgccgcatcacctatgcctgtctgtcttctgagcactcattctgggtcagacactgagctcgaggcagggtgcgcaggtgagccaggcggggagtgcagatgcagggaatgggtaggagcacacgcagggtcccccggcacttcagtgggggtgacacagcttctctgggaacccggtgggggcagggtcgcaagtcaaactgggcgtccttccacgtctccccgagctggcatccgaggagctctagtgttctgaaggctgcagggaggcgggaggcttctgggctgagggcaccgcttgtgcagaggcgaggcaagagggaatgcagtggggccaggccaggcagcagcagaaaggtggcacctgccgtcagggagggctgcgggtgctggccaagaggttcgactccttcctgcaaatgaggggcagcctcataaagcaaggcccgtggccaggctcgtgttttagaaaggtcttcctggaactcatggggagctttcaggaagggtgtcaaggtgactgaggctcctgtgggactctgcgagagcacggtggtgacctgagcgggtggctgggttgggtgtggaggagaggctgccaggaggggctgggtcggctgcaggctgagaggaggtgggtctggcctctggactgggttggtggtcgagctaccattctccgagtagggatgtgtcctgttggatgtgccctgggataccagagtggtgtgttctggaggacaggtgcaagtgttggctttcaggagtggcctgggggctgttgatccagagtcacctgtgtggtccttgaaactggatgtggtcacacaggaagaggatgaggagtgagcagaagcggcactggtctcctgagtggggacgctgctgggcaggggcagggggagcccaggaaggaaggaaaccgaggagttaggagggtaggaggcgtgggtcacatcaccggaggactgagtgggcccaggcatatgtgctgcagtggggacacgcagcccgcagcaggtcaggcagcctggggctccagggtgaccagaacaagggccagggcggaagccagactgtggcccagggccggggagtgccaagactgagggtgcagggtgatgcaggcagcccagagggcatgctgggaaggctggcaggggccacatgtggatggggcagggacagtgacgcagggtgggctcacatggttaggggccacggcaggctgtgcccgtgagcctggcaggggatgcagttttggcccaccactttgcctgtgatgtctgcagagcgtgcagtggctcaccaagctgagtggtcttgtcgctgggtggggcgtggctggtgggagcagttggctggaccccagtgctgctgtcgtccctttgacaaagtggaccctgagtggaggcggctggtgtcacgtggcagggcctgtgcgtgctctgcctctggtgcaggtcagccatgaggagcacaggtggcccctcagccccgtactgacaagcctgtcatttgtcctgtggaatggatgtcatttcacggcctttctcttttctctgcagcttacggttattccagaagtttgacacattccggattctggtttgtggcggggatggaagtgttggctgggtcctctccgaaatcgacagcctcaaccttcataaacaggtaccaggacaggagggagcccagccaggagcagagagggtgcggaggttagagggaaatcatgcagtctcagctcctgttcatctcggagcacctgttctcaggccagaaaccattggtggttttggggagtgtgcagtttggtggccagggcagagaggggagagcctgggccaccccctggcattgtggaggcccgggggctctggccatgatgtatgagggggacctgaagggagctacgaaaagaattgcccacaaaggacccacatggggagcagggctgggtggggctgttgctttactgggtaatttttgtcttgaggcctcttgcttgtgagaaggggacggcagtatacttgagtttctcaagtcagagtcatggttcattggacttagttttttgtattaaaataaaaatagattttcctgattgtgtataaaaatgttcatatagtcatttaatttccacaccaagccacggcctccccaggtgatcagccagtgccaacattttgctgtctctgacctctcttgatcacagtacatacaatgcacagtgcacttgtaatttaaacgggctattctgttactgcttttgttgttgttgtttttgtttttgtttttttgaggtggagtcttgctctgttgctgggctggagtgcagtggtgcgatctcggctcactacaacctctgcctccccggttcaagtgattctcctgcctcagcctcctaaatagctgggattacaggcgcacgctaccacgcccagctaatttttgtatttttagtagagacagggtttctccatgttggccaggatggtctcgatctcttgacctcatgatccgcccaccttggcctcccaaagtgctgggattacaggcatgagccaccgcgcccggcctgttactgcttttaaaaaaccactaattaagatgttgcagacaccttgtgcctgtgtctgtaagtaggcatctgtgtgtcgttttccactggacacacccgggagcccagggccagctcacctccatgtgtgagcacggagatcacttcccagtggtctcctctctgagcgcacccaagcttaagtattgaaatgtgctgacaaactgcctttcctcagggctgtgccagcttccatgcctgatgcctttaaagctgtctttccccgtgcaccatccaagctgttcatctctttagtttttgtccagctaagtagaccaaaaaatgtctgacctttacttctttaattcctggtgaagttgaacgcctcctcagttggttatgaagttttaaataaatcacctgttcatatttttttttgcctcattttctctttgagtattcacctttttttcctttaaaaatgggtgtgtgaggattattgttacattaacttcttatctgtcactgcagatatttttttcccggtttgtcgtttgtcagttcaacatcctttttggggggtggtcttttctttcatgatttttgtcaacgtctgtcatatttgcagctgcctacaccccaagattaagatttgcatctgtattttcttatgtttattatggccccatttttaaaaaattcagtcttctgtgtgacgtggatgtatttttcagtgattctgtggtgcctacccagctctgctcacttggtagtatttccaggtgggtggatttgacagctcgggccgtgaggccagtggctcaggaggagaagtggtgccgcctgctggtggattagcatagactactctaatttttgattttgtgtattacttgcaagttcactgtcactagttaggaagacagtggaaccttgtggctgattttcatacgttcagccaaggtcagcacacatttctctcccctgcgtctctttgacacctgatgtggtggccatgccttcgctgggcccctgccgcctcggggtttcttgtcttcctggctgctactgctccatggtggcctctccctccttacccttcccttaacgctgtgtcctcagagccttgctggggcctctcctccttcgcttttgaacgctcagcgacttgcagggcttctgctgtcgtctctctcctgggggcgcctcaattgatagctgagccttgggcctctctggatgtctcctagtgcctcgagtttccaacactacaccacgttcagcccccaccctgcgttcctttccttcgagtctgaaaacatcatccatctagatgtctgagccaggaaatcggacagttgttcttggttcgtccgtctcttcctcctgcctgtttctcactaattgtgtcctcagtcctgccacccacagtaccctggcctctgtccatctgcagctcacccaggcgacctttcccggggcatttctgcctgtgcaccccccaagcacgatgcttctgggaaaagtccagacctttaagagtcccagctttgcctcctgcttgcttctctgcctgtctgcctcctgtttcctcgctgtcctcctcttcactgagctctgccttgccccctcccagtggtgtctccctgcctggagcaccatccatgcctgctgtgcgctgctctccttttcctttaaggctccaggaagccctcgcggagtcctcagaccctctgggcacccttcagcactgggttctctccatctagtgtgtcggctccggtgtcctggcctgctcgctcctgcctcccctactgccaaatgtccccttggtgaggcaggaccttccctggtgtttgctgtccccacaggcggcagggcctcaagcatggtcacctccacctggtgggcagagggctgtacggtgctgtaggctggaccacggcaggtttcctgcctcaaggacagtaacgcctccccacacactccaccgcagccttcatggccctggtcactctgttgtcagagtcaaaggctggtgagctctgggcagtgggcattttaagaggcctcctaagcaatggaatggtgtagtgggatctcattggagctctgaaatgggaatccaggtggagggtgaggcctgagtaatgcatgaggtctcttcctggaacagcaggcaggcgggcagaggctgagctctggcaaggctccagggtagcctccagactgaggatggtcctggcaccttttttggataggatttagaggagagaagtgatactagtgatgtttttggaagaagaatttggcattagtgagtgagatgctgtagtggatggagggacgggtggcgaggcatcagagtgattccttggggctgtggtcacggtggtgaaaatgggaagcagagggatttgggagacagatcagagagggtgtgaggggctgaccatcaagatgtgatgacagctgagagatggacctgtggctcatccatttctcccagaagcagcatcttatctcaagggcagtcatgtttctgtctcattgccaaggaaaatgccatctgtcccctccagtgggctctgcctgtaatgtgtaagctgcgtggttttaggtcacgtccccacattgctaacgtaaccctcacggtgggggacaaggagggctgcgggctgggaagtggcccctgcccccaggtgtttgcctgcgcatcgtcccccatgtttccttagtgtcagctgggagtgctgccgctcggcacagggaacgacttggcccgagtactgggctggggctcagcctgcgatgacgacacccagctcccccagatcttggagaagttggagagagccagcaccaagatgctggacaggtgagtggggatgtgctccggtgccgtatgaggagactttgagagacaggtccctttgaccaggtgttcttaacctggggtctgtggaaaacatgggccctctgaaattatttgtaaagatttgacctgagtatatattcggatagtctttgatatttggtcagattatgacaaggataaaaacaaaacaggttaagaaccagccatgccctaggatgatccagtcttcccagaaggccaagcctgagtgtgtcagggccgtggagaaggcagctgtgccatctttggctgcttcagcccgagatctaatacccatcggaagaatgctccttgtcgtttacttgaacagtttcattttctcatattctgttcccagaagaagttttgggaaattatcctctagtgcctaaagccactgtgacaccttccctgagtaaggtactgttgtcccgagtgacacacttggcactcactgaccacatgcctgtggcacatggggtgctgatgagatgcctcctagccttcctagttgctcccagaagcctggagttctgagcacagttgtggttttgcaatgcccccaccatttcaggcctcctctgtgtgccttggggcctgtgaaatgctcatctcactgggccagctggctgagccatttgcagctctcttgaggagggtaaatccatttctcccagaagcagcatcttatctcaaggtagccatttatgggagaccttcctctctttatggagctgtactgccgttagttgtggagtgcagacatttgttctcagccaagttatgggacagagtcaagaccaagggcctaaaaatgaagtcagaaacggtgtaaagatcaaggctgccagccgtgaaagcggacggcgcagggttcacccttgtgggcctgcacgtcttgccgcctgtgcagctgaccttgtgtgtgcaggtggagcgtcatggcatacgaggccaagctcccccggcaggcctcctcctctaccgtcaccgaagacttcagcgaggattccgaggtattgctggcctgttcttcacaccctgctcgcatgctgatgtgatcagaactgtcctgtcagcggtttgcatcacctcccttgcagagacgcctcccctttggtgttggggtgtcacagtcaggcctgcggaggcgcagggtgaacccatggctgagaggattctcactccccttggcaggggccttttgggctttgtgaccctctaggggcttcctggggttgtcataggccctgccgggtggtggggtggtcctcctaatggcctttccaccctgtccgtgcatctcctcagctgcgcagtgagccccaaacggtgcgcgcccgttccctcccccgccgcggtgcccacgtgcctggaatgctctagccggctctgccgcggctctcccctagccccccggctcctgccccgtcccacctctctgtggcgtctgcagctgcccttcgctcaggctcctctagtccagctggtggttcttttcatttggtgattgttactgttgtgtttaacgctcctacagtttccctcagagaacagactttgtctttagtttctattttgtgctggtgcagtgctgggtggggtagtacaaagaggtgagcttttgtcaggggctagggcaacggtcagcaaacaaggcctgcaggccagatgtgcctgggcccacggccttgcaagcgaagactggtttgtacattttttatttttcctttttttaaaaaaaaattttttttttgagaggaagagtgtgtgggggaagcccagaatattcgctgtctggccagtagtgaagtttgcgaccctggggctgggtcctaaggacagcagggatcccacagggatagggctgcccttctgacagccagaacagatggtgggggcaggagtgtgtgtccagatggggctcacagccaggtggaaacagcctctgctgcaaacggacccaaacctggagccgacccgccagcatgccgctgtcaggatgagtaggggtcaggacggaagctcctagcacaggccgtgctgggatcgcagactgaaggagattcatttgcagtttgcctgcagcttgacgaagcttttaaaatctctcacctagcactaggtgagtcccagattagcgttagaagtgagttgaggcttggctgggtcagacagtgtctgttaggagagactcatctttcccagcttgtgctggcaaggaagtggctgacagagtcactgggactgtcatggagcttgctgtcacagagaccaacagtcctggccatttggggtgattgcaggtacagcagattctcttctatgaagactcggttgcagcccacctttctaaaatcctcacctcggaccagcactcggtggtcatctcctcggccaagtgagtgcctggtggccctggggagggcatggtgccctggcccccagcctggagctgcctctctagaagggtctttctgtttttctccccacagagtgctctgtgagacggtgaaggacttcgtggcacgggtggggaaggcctatgagaagacgaccgagagctcggaggagtcagaggtcatggccaagaaggtctgttcccgtgccctgggtgggaggggcattgaggcagcgagaagcttgctctgtcaccagcagagggccgtgactgcaggttgtccaggttcttggtgatttgaacaaagaattagacaaaacgcacagtaaaggaagacaagaatgaagcaacaaagaacgaaggcagggatttattgaaaatgaaagtacactccacactgtgggagctgcccgagcagcggctcaagggtccagacacagaatcttcttgggtccaaataccccctagaagtatcccattggccacttcatgctcacctcatgtaaatgaagtggtagcttgcattcagtctgattggtggcagaaagcagccaaccagaggctgaagtggttacaaaggtcacactcctgtgcaaacatctgattggttgcaaaaagcaaccaatcagaggctaaggtgaagttacaaagttgcatttctatgcagactaagactcagctcgcaatcagtatggttggttgtggacagccaatttccccaatttcccacctgccagggcgggaaaggtggggatttgcaaagggagtagcctctggtctttttgttacttaggcgtggagagttaggattttccttttgatcgagttctaggaagtctgggtgaaatggcctgaggttccctgcctgcagaccctgttctcctgcctcagctctgcatgccatttcctttccttgttcagtgctctgtcctgaaagagaagctggattcccttctcaagaccttggacgatgagtcccaggcctcgtcctctctgcccaacccgccccccaccattgccgaggaggctgaagatggagatgggtcgggcagcatctgcggttccaccggagaccgcttggtggcatcagcttgcccggcccggccgcagatattccggcctcgagaacagctcatgctgagagccaacagcctgaagaaagcaattcgtcagatcatagaacacacagaaaaaggtaactggccttgtgatgaggaggggctttcctcaggccagcactgggcatgcccagcgtcccctgaacacggagatgacagaagggtgcatgttgagaaaacctccactgcggccctctccacccatgtccaggcaccagacccccaacgagttcgcttgccctccttccacccctcctctcacaccctcagaccccttcatgctgcctcccctcgacctctttcctggccctcattgacttcactataagcgtctcactcccgtgagagccttgaggtcacggcctcacacccgcacacctgcgtgtccatgcagccgctcctcccgcttgcagccctccagcctgcgccaggctcctctgcatcccttgccttcccctgcaagggttccagacctcccagcctgttagcagggacgccctgccccagtgccaggaccagggggaagatgggtgggggtggggtttcggagtccaagcctttagccagaggttgtttgaggaagatcaggccgtggggtgaggatgaggggccctccacccagcctgacagcgcccttggctttgcacccgcgtgctcagccgcacacactctccttgcacagctgtcgatgagcagaatgcccagacccaggagcaggagggcttcgtcctgggcctctctgagtcagaggagaagatggaccacagagtgtgcccaccactgtcccacagcgagagcttcggggtccccaaggggaggagccagcgcaaaggtacttgtgcctccacctccctctgcgcaccgtcgtgtgcttggttttggtgagacgtagcgggcttgccaggggaggttttagggcactttctcatagttgctttggccacttggttacataaaaattgagcgcccaaggcctgtttctgtgcatctcctgtgcgcgcccttgaggtgggtgtgtgcggtctgtcttggtggacagcagtagaacccgcgagaccccctccatcagggcgaggactgcctccctgaggagcacttgcgtcctgccctcactgcttccttggaaccacactgggccccagaactgctcagaaggggctgtgtctggcagagggaaggcgggtgggtgagcgtgggccttctttgtccttgcccctcctggaacagcccacagcgcaggccctggtggagggcacccccagcctgtgcaggctgctgggaggcccatgctcagaactgacccatggccactgcatggccaccactgagagctctgctgtgtgtgtgctccgcctcccacagcccggactgactgggctcacccctccctccagcgctgccacctgtggcctgtgttaacctctccatgagcccagccccccaaacatgtgcacccactcggtcctccgcccccttctttgtcccacacacttcacgcaactgcctgtggtttgcagccctccctcctcagccctcccacctgctcgtgtcgctaaggaccccccaggatttcacagtctctattccacacagctgtaaggttttctgctgtgttgttacagtgtcgaaatctccgtgtgaaaagctgatcagcaaagggagtctgtccctaggcagttctgcttcccttccgccccagccgggaagccgggacggcctgcctgcgctcaacaccaagatcctgtacccaagtgagtggcggccagcaggagggactggtgggggccctagcacaacactggtcccgtcaaactgaaagagatgggctcgctgccctcggagagtttacaggcccctgagaaagataggtggaattgaaaaatttacacgactgtatgaaaagtgctttttttttttttttaaaaacaaaaaacaaaaaacaaaagccagatagtacccaaataaccacccaaggagcccaggaggcgccattgaggaggtgatgctcgagtcggggttggaagaattaaggaattatctgagtggaaaagggaggtggccggcctgatgagggaacccgagggaccatcccgtgcttctagcgtggtcgcaggaggcgcagggagggtgaggtcctggccgcctggagcattccttgatattcattccttaggaaggcagccttataaagccttaagcctcaactctcagagatcattttggtggagtggcttacatttaatgagaacatgaaaactgactctataagcctttttttttttttttaaaagagggtctctctctattgcccaggctggagtgcagtgatgtggtcatggcacactgcagcttgacctcctggactcaagtgatcctccccactcagcctcccaaatatctgggaccacaggcacacaccttagaagccatttttttgtgtgttttgtaggtgttggtttctgccacccagtatggtttctttgttccagtgatttttgacctaagactattggcaaaatttggacatggttatacataattttagaaacatttaattataataacgttctgcagaataccggtccaccagcttcagagacacgagcttctcctaaggctgtagctcctgaccagcaccacctctttcttgtatctcctttacagatgtccgggctggaatgtctggttccttacccggtggctcagtcatcagtcgcctgttaattaatgctgatcccttcaactctgaaccagaaaccctgtgagtatgagggataaaccgagtgggcatattgttacatggctgctagtgcatagaaaacagatctcaggattaactagagaaattagtgagcagttgcccagctggtggtagctgataaggaaggctgagaagtcgtggagattccacttaaggagtggagctggaaaccactactgcacatctgctgcagaggcaaagcgcacgcctcccatctccttcccaaggtcccacggtgcttgcttgacgtcccctgagcctgcatgcccttctgaggcttttcacaggctcagctactcctgccaggagctgcccttgtgctgctcttcgtggtcactctcccatgatcttggctggacctcactgacttctgcttacagcctgccatcttcctcttgccatcccttccctctgctttcctctaacacctgctctccttgttggtgatgcagaaccacagactctgagctggagggtcctctgtgtgtctcccttgtgtctccgagcaccttagggagacactagcctgtgctgaggcttataagggctgctgcgtgcctgcgtgctgatactgctactccttgggggacaaggccttcttcctctgctggcctgtaaggcagtgaggacatgtatatagcagtttaatgcagtcttcctaggtattggagtccattttggagacaagtggtgttttgaaaacctgtttttctgcactcatctttatgctggctgattgcaggttctgggcagctggtggcagttggttaaatgtggccagccatttttctggagtggtgacggacagtgacaggaagaaatgtgcggttcacagaggctctgggtttgggaaagtggacccctagattccaggtgctggcctggtacagcacttcagtgtccctgttcctggcctggtctactcctcccctggggctgcgtggggctccagttctcagccctcctgaggcttttttccttggggaggccagagctgtagtcctatagtgagcactgtccctagaggcccctgaactggatatctcctttgtctccttcatctgagactggaacttccacttctgttgctcagctgggtggtctcatctcttcttttcacctggggagacaaagctgtgctttgctgccttcctgctgtggtgtgtgcctgggccgtattgtgtgggccccattgtagctgggcctgagcagcccctggtaccctgtcctctcccactgccccagccactgccgcccctcctgctccaggcccctgagcccagtctctgctgccttccctcatctctttgtcctgtttctctccgttggatctctctcttttcccaggacctatacatgctggccaggcacttggtcttccccctggtaaacagttttgtcccagagctttgctctggctcagctgtcgggcacttgaattagatggatcataaatacactgacacatgctggttgttctcagatctggcggcactggctcagtaagctaaagtgtgtcagaattctggcccgagcaatgttcccaagcccatccacccattgagtttctttgggaacttccagaacatcctcttctcctggctgcagcctctgggtggaggaacaggggttcctcccttcatccacttgccctcggggggaaaccccagtgtgaccctggggttggggagggtgaaggccaggctgggctttcccagcagctgggggagctgcaggagcaggacttccagctgggtggggagaagaaacttgaatgagtctcttctcgtctgtcgcacacggggaaaaggaagccttgtgctgtggggctgggatggatgttttcaagtcattttcctttttaatttggcaacagctttgcttgtaactagggatgtttgagaaatgttttgagatccagagttgaaatgtgtgagtttctgtgccataaacatatcttcaggtttggtgctgctggtggagtgtaagatgggcagctgctgtggggaatagtccagcagctctgccggaggttcagcccagagctgctgtgtgaccagcaggcgcagaactgccgggccatgtgggattgaactgaaaacatgtccacgctagaagctgtatgcaaatgttcctaaatgataaccaaaacgtggaacatcccagtgtccgtctgctgatgagcaggtcaatagatgcaggttagccacgcagtggagtattatttggtaataaaaatgaagcgctaacacatgttataacatggatgaactttgaaaacatcgtcctgaggaagagaaaggagccagacacagagcccacgaccgcatgatcccattcctgtgaactgcctagaagaggcgcctccgtggaggtggaaagtagacgagaggcgccagggatggtgaggatggagagttagttgctgatggcaggagtacaggctttctctttagggggatgaaatgctctaaaatcgattatctagtgatggttaaatgactctgaatatactaaaaataattgaattgtacattttaaattggtaaattatctagtgtatatcttaataaatctcttagcagacaaaaaagaaaaagttaccagttttccccaaggaagagaaatgctgagaggttgggagtctgaaataagactgctcagcagggctgttgtaattgatttaaaactcacctttgcagagagtattacacggagaaatgtgtcatgaacaactattttggcattggcctggatgcgaagatatccctggactttaacaacaagcgcgatgagcacccagagaagtgcaggtaggtaacaggctcaggagcacgtctgtcttttgcgtctttgtggcttctccttccagacagtagcagatttctggagtcagcaggttaaagaacgtgcagaatgctaaggcggggggcagaaatggagcccagatcgccttgtcagaagcacgggtgctttcagagatggaagggaagcacctctcgggctggccaggtcaagggaaattcaacatcggaaaaccagtgatggtggtcattggaatggcggcatctcttaatgagagccccaagtccgtgatactacagaaaagcggcaggtgtgccaagaagctattgcacctattgcgtaagtgcccagcattgtttgtgggagggtctgtgtgttcatcaccaccctagctggccctcccccatcacacccgagcctgcccacaaggcccttgagtccaacctctgcaggaagacgggagcgtgggagccccaaggggcatcactgggggtttcagtttttttcctctaaaattactggatactcagtcctggcctgaagagaggatggagaaaaatgagaagggtccctcttctcaagcttttcttcctgggctgatgtagaattctctcttgtctgtgaaacacaagaagtgagggagaaatgtctccctccccaccccacagtaataatcagagaggccattcagctttgacatgattagaactacagagagggagaaatgagtgtgggggttgacggtgtttgtgcagagaacagcccttgacccagaagctgggagacccttgctggagtcttcgtccgctgagtcaggatgggcttgaatgaaccaagccacgtggccccctgtggcctcgccctcctcatggcgtcactgccaccttgcggggagccatgctgacacctgagggtccagctttagtcattgctcaggttacatgtagttgaaaatttctaggaaaacaaaagcatcagaactgaaagaacttttgactctgaggctcttccatgcaggagaaaatggctcaggggccccagggacatatccctgtacagcacaggatggtaacgtcagatcatttaaaaatccctgttagtccaaaaatcactgggaaaagtattaaaatacacatactttagcagggtaaaataagtagttgaggaacaggggcatgcataatacatttctagagctttggaaccctggtcaaacctctcttgagtttgtattgagagctttgaaaagttctcctgagaaaaattccacttgtacaaatgtcattggaaatttctgcagaagtcattggaaatgttggttgacgtaggtacgaagggactcctagcgtgtcatttccagagctcaggcatggggcggaggagtgtaatcaaggggattggttcgataagctgtggtagagcagtgcccggctgaggatggccacatctgcagagagcgtgtggccacagaaggaagcattgccggcgcagggtaaagtggaccaagtaggtcgtgaaactgtaaacaagttactgcaactggaaattaatatgcaaagaagactgaggaaatacatagcagcacttggcatttgtcattagcacgtgtggagggtgcctacaggtgctggattatgcatggaggattatgaggagtgtcttctccttggtgcttttctatattttccagtttttctatggtaagcataattttttagccagaaaaaatcaggatgtgtagaagtttttttatagggttctataatgttttaactttatgtatttacctttcagggtatgattactttcttggcaaaatgttactattgagcaaaatttcctattggtaaacgtatctttttatgcatatctgcaaaaacaaaaatgtgtccttcagatgttactgctgtaaataattgctaaatgtagctgatttgtgggtcagatgctgttcccagctttcacagaaatgactctggttaactatacgaagaaagcccagacctatggcaagtctttgcttctgtttctaggagccgaaccaagaacatgatgtggtatggagttcttggaaccaaagagttgctgcacagaacctacaagaacctggagcaaaaggtcttgctggaggtgagtgggagggtccttgtcacctgcaggctggcctccatccatcagcagactgccaggcctattgcttctcctgttgaccatttcctccatgcacagggacttgcctggggatgccctggccacggctgtgctcctgagcccctggcggtgggaagctggtagagaaggaggggctgactcatacctttctcttttcttttgttctgtgtctctgctgctcagtgtgacgggcgacccatcccactccccagtcttcagggaattgctgtccttaacattcccagctatgccggaggaaccaacttctgggggggtaccaaggaagatgatgtatgtatggggtgtgagcgggtgggcctgagctcagtggggaagagctgtctgagagcaggggggtgttctgctgtggctggggtggatccagctcttctgttgtgccagcagtggggttgccgtggagaacaagatagacagggtcccccacccagctcatcgtctagagggctgagcagagcagttgtgtcagtgaaggtggtcagtgagggtctgtggtcagcagatgtggtcagcgggtgtgacgtggaaggagggtcagggaaggtgtctgggaggccaagacctgaaggatgagttggagttggctaagttaggtgggcagaggagagggggaggctgttccaggcagagagaattgcacagatgaaggctcagagtcaagacagggcaggcacatggaggatgggagagaggtgccccgactgcagtgggcagcaggggcgtggagagacaggagagggctgcagggcctgggtcacactgggctgtgtgagctggggaagaagtttggaatttgtgttaagaactgtgggaaggtgttgataggtttaaacctggtttaaaccttcctttgtacgtaatagcgaatagaagtattcagcgcttcctgcacacgtggtgtgtgctggccccagtcctggcactctgcagcgttaactcacttggccctactgatggccctggaggagcgtgccgttagtttccccattttacgcatgaggaaatgggggagagagagattcagtaactttgccgagatgagagctgggatttggtcccaggcagctggtttcagggcctgcaacatgaagcccgtcaggagtgcagttacctggtaacttctcgccagctaggaggggctgacccccagagggagggagtgagggtaggggcggcctgtgctcggggatgtgtggagtggtggtcagctctaacgtgtcccttgcagactttcgcagctccatcattcgatgacaagattctggaggtggtcgccgtgttcggcagcatgcagatggccgtctctcgagtcatcaggctacagcatcatcggatcgcccaggtagtggccatggtcctggggtgtctggccgagtccccagcccggagtgtgctaaattctggggcagtgcatggagcctgggagggtgggcgctttccagggccatgtggctgcctcatgtcctgtcctggacagctcgtggccccacttcctgggccagagccctttccttgtgctatgcttgacagttaaattctcaagataactctttttaatttttttttttttttttgagacagagtcttgctctgttgcccaggctggagtgcagtggtgcaatctcggcttgctgcaacctccacctccctggttcaagtgattctcccgcctcagccttccgagtagctgggactacaagtgcccaccaccattcccagctaatttttgtacttcaccatgttggccaggctggtctcgaactcctgacctcaaatgatccacccaccttggcctcccaaagtgttgggattacaggtgtgagccactgcacccggccaagataactctttcaaaatgtgtatcctgcttgaaccacagccttgcctgtcccctctgaggtgggatgagatagagcagacccaggctggactctgcccgtgtctgcagctgtcaaagccgcagtggggacggagcccatggctctgatgtggggtgtgggaggatttccagctggggccctcgatcatggttctgaggccgagtggtgaagggctgggggtgcccccatggcttatttctgacagcagcgatgggctgagggcagtctttctgtgaggatggggcaggactctgtacccaggcacaggcactggggcgggggagggtgctgatgacacccactggctgaaccccaccctgcgactgtctggtgtcttccagcactctgtctacccttagctgtaggctgcttgaagttcacaattttcactctttggcaatgtttgttgttgaaaaggaggaacgggatgatgatggatggctcatcgtcatccactgtgccatctgctcttttctaggggtgttttcacgtggcaggggcccagtggcttctgggagctacaacacccctgcccctgggttctgacacctgttgtctcagcaccaaggtctcctgcactgactgctcagtgaggggatggggcgggatggggcgggacagtgggagaacagaccctcggttgagtgacacaacagcagaaggctagctgcaggcggagcgccatcccagaggcagaggtggggtgtcctgcaaggcagggacgggtgtgtggagcaggaaggtcatggtggtgctgatagcacttttaaacccctgggggttttggctcagcatgagtaatggctatgatgtctgctcagtgtcgcacggtgaagatctccatccttggggatgagggcgtgcctgtgcaggtggacggagaggcctgggtccagccgccagggtacattcggattgtccacaagaaccgggcacagacactgaccagagacagggtaagagcggctgcccgcggtacctgggtggggtacagggctcacctgtgggctcttgtgtgcactgttaagagctggagctttttgtgttttgttctaggattttttttttttttaagacacaatgattaagctaatagggcagtaatttctaggaccatctccttcccctaatgttaaaaaaaaaaaaaagtcctatttgtctctttctagttgtgatctcgttggcatccccatagtgtctgtcgcagtcagatgcatgcttcagagcagcaggtgtaattgggctttcgggtccataggcatttgagagcaccctgaagtcctgggaagacaagcagaagtgcgagctgccccgccctccatcctgttccctgcacccggagatgctgtccgaggaggaggccacccagatggaccagtttgggcaggcagcaggggtcctcattcacaggtgggctcctacccctctgcgttgcgcatgagcctcccccagggtccctgggactgcactcttccaaggcccctggggcgtggagctgctgctcctgacttttgtggggtctgcattacccatgagggccgagcctgtttatgtgccctcagctctggctcatttccccagtggtctttcagaactcgcctggagtttacatggctggaacctaaagcccactgtgattttcaggaccactcgtttaaaacctgcccgggctcagccgggcgcggtggctcacgcctgtaatcccagcactttgggaggccaaggtgggcagatcacaaggtcaagagattgagaccattctggctaacatggtgaaaccccgtctctactaaaaatacaaaaaaatttagctgggtgtggtggcgggcgcctgtagtcccagctactctggaggctgaagcagcagaatcagtcgaaccccagaggcggaggttgcagtgagccgagatagcgccactgcactccaacctgggcgacagagcaagactctgcctcaaaaacaaacaaaacaaaacaaaaaaaccctgccctggctcccgagggcagcccgctgacagccgccttcactttgccctcgttttaccctgagaacaggcttgctctttgttctcaagtttactttaaaaaaaaaaaaaaaaaagacaactgctggggcatttcctctcacctgccttctagaaacacccctggagccactgtgtccctcgtggctggtggtcagcattgtctgccattcctgctcctcgcccgccaggtgcgggttccgcctgtgagtccctcccagccggcagctgtgctgctccgccggtgcggggcctgcctgcattctccccccgtggccgcacgctggctggtgccctggtgtccctttcttgtttcccctgggctccttcttctcctggctgtggacaggtgcacccgtcggttttgtgcccggcatgccgtgtgcccttccaggcagcctgcccagccctggcgtgcagatggatcgtctgtgccagccttcggctcttgtcgagcaggtggtcgctgtcccagtcatcaccggcgttcctcgctctgcacttccataccggctgcagtccttcctggcgctgcattctctgccccaggagttggtgccactgcggcccctgtcctcgtctctcccccaccccacccagatcagtgatggggctggaggacttcagttcagctaattccttgccgtgcagtgggcttctggtggcctcccctggaaagccattaccctgtcccctcaaagcccatggtggcccctctggcctgcctggaaggtgcacttgcacagcactgcaggaagctgctggcagcggcctgtttccacagggtcaggacaggctggccccgctgcctttgcttgcactgctcctatagtctctgtcccccgatctcacctgcctgagccacatctcagcctccctgggacctggtgtgacttgtgctctcaccgtcttccctatgagggctgctatctggggtctggctcagagcccatcactgcaccaggattgtcctgttcagatgagggtccttttgtccccagggacagaccggccagttacaggttccagcaaggctgtggggattgtgccttactgcagcagtctctgcagtgggcctgtgcacactgtcacttgcccactggccgttttacaggttgtaagcctcattttgtacatttctctccctggaaaatcttggattttgacgtcagatttctcgtggaagccctcccatttgctgtgggtcatcctgtgcccaagcttgtgactgaacggtcgctgggctgagccacgatccctgtcgtcctgctgggcctgccctccacatcagccctccaggtggtacctgggccgtgttcagatgcgtattgtgaaaggctgcccttccatttggcctgacatctgcccgtgcttctcttcctctctagtatccgagaaatagctcagtctcaccgggacatggagcaggaactggcccacgccgtcaatgccagctccaagtccatggaccgtgtgtatggcaagcccagaaccacagaggtagctattctggccttttcagtcctggcttcttctcagtgtctgccgccctcggccctccccgtgcgtgttcattcccccgcctccccggtgcatgttcggccctcccagtgcttgttccctgcccctaaccgtgcatgttcggccccccgcccccatgcatatttgcctggtttcttctaggggctcaactgcagcttcgtcctggaaatggtgaataacttcagagctctgcgcagtgagacggagctgctgctgtctgggaagatggccctggtaagctggtgccccagggacagcagggctcgggctgtgtgtgaaacgactgctgtcgccaggttgctgggcacacagggcagcacactttagtccagagttcccggtcttaaggaatgggccgcagaggtcatttggtttgttgtgcggctggtgcccacccctgctggcaacccctcagtcaggttgtctcaagcatgcgagaagcgcttgcagcggaaacacccttgtcgtcgtggacagaagatgcttttctgccttagaagcctgtagtgcagagtcctgctcctgccgagagctggccacactctcaggcaccttccatgctcagccctgcaaaaccggctgatatggcagctgtggggctgttactgaatcacaggggctagaacagggagaggcctgagagactgactggccagccttctggttttaaagatgaggaggaaggggcttgataaagattgggcaactggagaaccgccccaggtgtggtttcccagccctccactccgcacgccactcacctcctcactgcacgcgtctcctcactgcacgcatcacctcactccacacatcacctcactccacacatctcctcactgcacgcatctcactccacacatcacctcactccacacatctcctcactccacacatctcctcactccacgcatctcctcactccacgcatctcctcactccacgcatctcctcactccacgcatgtcctcactgcacgcatgtcctcactgcacgcatgtcctcactgcacgcatgtcctcactccacgcatctcctcactccacgcatctcctcactccacgcatctcctcactccacgcatctcctcactccacgcatctcctcactccacgcatctcctcactccacgcatctcctcactccacgcatgtcctcactgcacgcatctcctcactccacgcatcacctcactccacgcatcacctcactccacagaaatcctcactctacgcatctccttatcccatgcctcccctcgtcccacgtcccgtggtcacacgcgtgtcctcactgcacacctcctgctgcctcctgcaaggttcgactgctgactttgcttcccacagcatttccactgcttgacacaggtgaatggctccgaccccatttctgacagagggacacaagcaggtcagttgtcagccttgctctatgtgaattcatcgttgactgatggacagttttattctctcaccagcactacttagaaagtgaggttctgggtttggttccttttctggtgctctgggacttcgtttctggaaagtgagctccctgatcagagcagagcagagccctggagcggacctcacccccctgggcctcgcgctgatcagcagtgcacactctccatttctctctccctccctccgcctggagcagcagctggatccgcctcagaaggagcagctggggagtgctcttgccgagatggaccgacagctcaggaggctggcagacaccccgtggctctgccagtccgcagagcccggcgacgaagaggtatgtggctcatagggctgtgcctgggtctcccggacatggtggctctcgcctgaagtgcctgtgttccttgtgacccgtgtggctctgggatcaagatcgtgtcgctccggcagcccctgaggggccttctccagacttcgctattaaaatgctctttaaggcagggagggacagcaggtaggaaggagttctgggctgggattaagagtgccccttgaggaccagggacctgttgtcctctgaaacagaactgcagggcttcctggacagtgggtagaaggaaggctgagcccagccccacagcctcccccgagggtggagatgtatcatgggataaatggcagccttttgggatcccgctgtggacagggcgcagttggtgtgcgccactccccactcacactctcttcctgtgtgaacagaaagactccagctcgtcgcaggtctgggagggacccgaggacgcagggcatagcggaccctggggtggagtcacattcttctgcagggagtgctggctgaaggagccctggagagggccgtgtctggacaaggacaaaccccagcctgtctcttggcttccctgcttcagagatagaacacagaggggccctgaggaaagctcatcttgggcagtacagttgcagaaggcaaataactgcaagacgccaaacctgggcacccctgcccagtggggtttgtgagacctgtgggcagcagtaaggcgaggggacagaggtgggcagctgcacaacagcaccctctttccggggccctggggcgttttttgacgcatgcaatcctttcatgggaaactgactcaggcactccagccgatggatgaaactcagcagcttctcagtgagggcacttgggtataaaaggacagggcaagctcctcaaaatccattaaataattcattgtaaaggtgattaagaaattttacccaaaattacaaaaataataatatacaatgattcaacagatgtcacagtgacatagccctataataccagattaaattaaggccagtaaagtgggcagtgaggtgagaggctgggaagaggacatggacggggggaggaaagcatgttaaattcctcctcttacagtggaagaacgttacaaacaacattcttgactttcatacttggagaaatacagagtcaataatgtttttagggtcaagagtggtggctcgcacctgtaatcccagcactttggaaggccaaggtgggaggatcacgttagccgaggagttcaagaccaggctcggcaacatagtgagaccctgtctctattaaaaaaaaatttttttttaaacttaaaggtaatttctaatagagctgaaaagatttatatcttccaaattgccaccaaggacaaaaataaaatacaatttatattgtaaaagaaagtaaaggaccagcaagggtatcgctaacagcatgaaaataagataacagaaaaatgacatggctttctcttaaaagtaaattcttaggttgtgttttaaaagaaacctaaccatatattgctcacaagagccctgtttttttttctcatactcctaataaaaatttatgatacagaaagattaataataattaaaacaccataaaaaatccaaagtaacaatataaaaataaaattgcatatgtaagacaataaatgataaaaagaggatcactttacattggtaaaatacaataattgttatgtatagtcatcaacttatgacagttataatagtcacgaaactgtgccaaataataagcatctaaattagctgttcaagactatgttttttattccctaacttcattttactgtgctccaagcaatggtctgtatgttactagtcctttgaaatgtactgaggtgagacttgcccaataggtggtttttgtaaatgtatcttgtatgcagttgtgtttacatcattaagttcctactgaaattttttttgtcttcttgatagatcagttaactctaataccataattgtagatgtctcagtttatctttgtggttatgtgtatttttgcttcatgtattttgaggctatgttattgggtacccataggttttatcattatataatgatccttttatctttagtaattctttttatcttcaagtctacttgcttgctatattttttcatagttttactttcaagctttatttggagtgtctcttataaagagtgcatcacagagtgaggcagtgttacctccgtgcatctcagggagtgctgtgtggagaggctgccgccgccgatggctgtcaagagcagaggccgagcctctgtgtggctccgctcttcacccttcctctgctcttctgcctcagggagtggatcgcaaggaaagaatgcaaagtgcaggagagttttcattagacagatactcgtaatactaagaatcaaagcccagcaatccaacactagaagattggctaaagaggttattttaataatttttgtttagatactgatatttatgatattttcaaaaagtttttaaatctcatgagaaacgcacatgtaaagtgaaggaagtagaatatgataaaaatagacactatgatcactttgaaaccactttaacactcactaaaatcaacactaaatacaagaatcaataagggagagaagccctttcaggcacaagaggtctttcccagctcccgctcatctcagccctgcctgccctcccagcctctctggtggagatgggcatgaggccgtgatcagttgcagcctgattctcagtattcctcattctccccaacagagtgtgatgctggatcttgccaagcgcagtcgcagtggtaaattccgcctcgtgaccaagtttaaaaaggagaaaaacaacaagaacaaagaagctcacagtagcctgggagccccgggtacctgcctctctcccgcgtgtgtttctggccgtccacgcctgctggatcggccccgttcccctggtctctgctttctcccttggccttgcagctcctccctcttggtccctgtgctgtaacccccggtcctgcgaccacacttgtctgttggtagctgcagccctccaccctgcctgcttcccctctgaccgttgtcacacccggccctgacgtgctctctggctttctgcctgccctgagttgggggattcgaggtggggaggaagacagcagtagagtggtgacaagacaaacttggagacacaaagctctggactcaggccgtgctggggcatgccctgcctgctccctcctgggctgctggttcctgataaattgatgcattggtcgaggttcctgtgctgggaagcccaggccaccagagattgtgggtgatgaaatcaatcgaatatggtcctgaaggacattgttcctttgggtcagtaaattggagctaaactctctgtctgaaggatcagccctgaatacccaggccatatccagtgctgtcaggggctggagaggcctccaagcctggatattgggactggtgtttgccgccagtcagggcagctcctgtgggtttttcttctttgcatgtttgtccagaaatggggtttctgttaataatggtggctctgactatgtgaattgaaatctctgctcgtttcctttcctgctatggtccagaagtgaaatttaacccttctagaagctggaggaaaagctggctttggccacaatcatgaggacatttccctcatatttggtggtggtaaatccctcctgggacacggggaaatgaccagaggctggcggcccacctggcaggaacagatgccagctctgctgcagccatcgccccttgagcgggtggctctgtgcctctttctgcactgctggtgggtggtgctgttggctgggtgatggataccggctgccagagatggctcaggtgccagctgctgggctatctcaggcactggctgctgggctatctcgggtgccggctgctgggctatctcaggcgctggctgctgctgggctgtctcgggtgctggctgttgggacgtctcctgtcctggcactgggctctcgggtgctgggtgccagctgctgcctaccttgcactgggctctgggcactcactgcactcgtgcttttccatctccgacagttcacctctgggggacagaggaggttgctgcctggctggagcacctcagtctctgtgagtataaggacatcttcacacggcacgacatccggggctctgagctcctgcacctggagcggagggacctcaaggtacttccataggcgtctccctggaacctgcacttgggcttgcacgcagctcccttctcttccatcctctcccccgacctggccatgtcccagcatcacgattcttctcaggctttcgtgtatacctcaggtgggggcggctgtggccctcatctaggcagtgatggctccacccaccacaaccagaggaagccaggagcagacataatggggggcagagccttggttatcttaggctactcagacaaggactgtcttcgtgttaaaaacactatgaggggacacagaccctgaagcacagtcacacacgactgtccccatgctgctcctgggcgggtgctgccactcgtctgcagggagcattgggaggggtggttgggtgccaggcctcggtctatgccaggcctcacgccacatcttgcaggcccatgcccctgcccaggttggcctcaacgggccaacccctgggtgttgaatcactggctgagtcccgagagggcaaaaggccactgtgggtgtcctggacagtggctctcatgaggtcacttgtcatccacttgcttttaggcctgtgttttgtctttgtcttggatttgtccttgctgatggtagtgactagaatgcaggaacaatgggccaggcatctgtatggttgttacttttaagctgtttccatcttgttttaccgtttttgtcattttggctctcatttgtgttcacaagccgaatgggaagggccgttgtggcaggcctgctgtggagccctctggccctggctgtcttctcggcatccatggcggtgtcttctctgttgcaggacctgggcgtgaccaaggtgggccacatgaagaggatcctgtgtggcatcaaggagctgagccgcagcgcccccgccgtcgaggcctagcctctgtcctctcagcctgtggcctccacatccccgccgccgaggcctagcctccgccctctcagcctgtggcctctgcgcctcctgccactgaggccctgggcagatgctgcagcccgcccccttctcatggtgctacttcctctgtcagctacagaaagcctccgtgacaccgtccaccagagctctggggtctcgaacataacaacacagctacctttgaaacaacactttctccagctcagagtcacctggggcacatgtgtcacggccactcagctctcgcccgcctgtgctgtgggccagggaatccagcggcgtctggcctcctgggcactgcttgcctggcctcgtgcttggattgtcccgggggctcctctccgtgtgtccttctgtggccgcaccgtgtggctccgcctcctggcccccagccagttctcagaaacgtggctggggcccagcacagcagcctgcaagggcccctgtttgttgatgcagcttttgttgaacaaaaatcgtgctctttcctggtttgaaagtagcatggatgtttccagtcttgttgattgtaatttgacgtgaagagaaaaaaaaattcctcctgcgtgagccaaggcagcgggtgctgtttcccaggcggggagcccctccctgggtgtcacagggcctgtgctcctccctcctccatcctctctcctcccgctcctccctccccccactgtgggctggggacgcctgcccttctgtctccggacgctctaggcgagttcagcttggggtgtgagtgagacagcttgccagctgcatccctgcagacagaggatgtgtgtccacatgagtgtttctgtgtgggaaatgcttcctggctctgggaaactttttctgcccattctgtggttcccagggagcgtggccctggtgggccaggggtggtttgacctcttcagcccgtccggtggcctggaggccggaggctctcctgagtgtctgcccctgcagtggcttcttgtcgcctgctgctgggcgtgatgtcgctggaggtgctggcagggactctgatttggtggtccgcgctgcccctgccctgcctctgtcctggctctgaactagtagatgatggtgccagagggcagggagctcgcctggggagagggctgtgccccgtagggacagtgcccaggtgaaggatgcccctggtcctccagggcactgactttgcccttttttcccgttgatagtcatggctcagaggtgcttgtaaatgtcttgggaagaggtttctgtaacccctgccctggtgtgaggaggaaatggctctggcctggctgcctggccgtggcttctctttggctcccaaagagaaggacagtgttgggagtatctgccgtggcttctctttggctcccaaagagaaggacagtgttgggagtatctgccggcgctgtccaggtcctttagtcagcgtcactccatctgatgtgcagaagctgggctgcacctgcgggggtgggcatagaccgggctgggtctgcagcagcccctggtcctgagcaggcggcagtgaacagcactggcccacctcccactcacagcccctctgtcccctctgcagtgcacccaggtgggcccctctgcgtgcctttgggtgctcccctctcgtggtcgttctggcccgaggcccttagagtatggaggctgagccaggccttgggtttccccagcacagcctcctgtcgctgcatgcgacgtgttgggatttttggatgaaagactctcccacgctctgttggtggacttagctgcctcactggaagtgatgtgggtggaaggtggttgtatgttaccttttccacctctcattgttttccccagaacattgtagatgggggttggcagagggagaaataagccagccacggcagtcgcttggtttcccaggtggaatgggctaacacaggagatgatgggaacctgtcccgcagtccctgcatgaccattggccctgctggcctggcgatgtgggcatcctggggttcttagggtcccagaacaagccccaggcaagctggaacttgggtggggaggggacatgaggaggataaacagctgactgtggcttcaaggacatcagggccaccccaagtcctcagtgtcctactcctggcaaggagttgggtttggatcaaaagtgtttaaaattaatatgttgtcagtgattagaacaacactgtttacataaaaaccatttttctaattctaacaagttagaatgtgaggaaggaatgaacatgagtgtttaggaacctgccctttggtgctgggctggcgtcccgcactggggtgtcctcgctgtctgggggctgctctgctgccccggcccaggtccccttgtggtgttgccagacgggcctcatggtctgctgtgcagagagaggcaggaaggatccctgaagagtcttggagaaaaggttctgtgccctcaggtggggcttaccccctcgtatttataatcttaatttatatagtgaccaccgtggaaacaaacgcctcttgtattgtcatgtacatagtccatacctgagtgctgtacataagttgttctgtgtataaataaaacaagcctgtttttgatcttccatcgccagagtctttgtcatcattccttgtgctttgacataaagtgttggttgccggaatctttccaaactggattcagaattgtttttcacctgctctgaaaataggttgagttgttggtggctaaaaagcaaaacagaatgccattagcatgccatcagaatgccgttagaatgccattagaatgctgttgtattttttagggtgtgggttctgtgatcagttggactaaaaattccgcaaggagagagagggtactgggcagtgctgaggctctcaggtgtgaccacacagccttggcccgggagaatgagggccattttaacgaatattttaaccctcttaaatcttttctataaaactgcaaacctgaagctctccgacttctctgctttgtcttggtacttttatttccaagggaactgtctacgatcaaggccacttgaattgtcttccccagtttcctggagtgagggatggggactgcattcatggaagacaccatcaggctggtcgggtacagaagggctgcatgtgctccgggagtgttggctgcctccctagcagctcttcctcactccttccatggtaacaaacccccccgtttttttttttctggtgtatattctcctctctggccattcaggacttcaggcctcatggttgcaagatggccaccacagctccaggcatcacaccagtgtaaggtgtttggggacaaatggctgcctcttttatgtgtcacctgctctttttgttgttgttgttgaagatgaggtcttgctctgtcttctggtctggagtactgtggcataatcgtagatcactgcagcctccaaatcctggactcaagtgatcctcccacctcagcctcccttgtagcggagagtacaggtgcatgacaacatacccagctagtttgtaaaattttttgtagagactgggtctcgcttgcttcctaggctggttttgaactcctggcgttaagcgatcctatgtgtgtctctttttaagataaagggagccctttccgaagctctggcttcagccgacctcctctaatgtcttggctagaactgcctcacgcactcatgactaaaccaatcagtgcgaagggtacgagctattacggtgatcgggatgctgacggctgacactttataatttgtgccaggtgttggtctaagtaccttgaatgtacgaactcctctaattcccctcacagccttacatggtgggttatctgcattttacaggcgagggacaggctcagagaggcgacacaacttgccccatgaggcacagccagcgcgtggctgacatgggaggcagagggcatatcttttcgacagccgtgctctcccgtgtcccaagcctcatagcaagcccagcccacaagacaggtgaggaaattgggcccaagtgacaggcatgctttccagcacagcagccggggcgcctcacgtgctgggggcaccagatgcccgggcaggggcagac
